(19) United States
(12) Patent Application Publication
(10) Pub. No.: US 2005/0191732 A1
(43) Pub. Date: Sep. 1, 2005

(54) Corynebacterium glutamicum genes encoding proteins involved in homeostasis and adaptation

(75) Inventors: Markus Pompejus, Waldsee (DE); Burkhard Kroger, Limburgerhof (DE); Hartwig Schroder, Nussloch (DE); Oskar Zelder, Speyer (DE); Gregor Haberhauer, Limburgerhof (DE)

Correspondence Address: LAHIVE & COCKFIELD, LLP., 28 STATE STREET, BOSTON, MA, 02109, US

(73) Assignee: BASF Aktiengesellschaft, Ludwigshafen (DE)

(21) Appl. No.: 10/721,922

(22) Filed: Nov. 24, 2003

Related U.S. Application Data
(63) Continuation of application No. 09/603,124, filed on Jun. 23, 2000, now abandoned.
(60) Provisional application No. 60/141,031, filed on Jun. 25, 1999.
(60) Provisional application No. 60/143,694, filed on Jul. 14, 1999.
(60) Provisional application No. 60/151,778, filed on Aug. 31, 1999.

(30) Foreign Application Priority Data
Jul. 8, 1999 (DE) 19931418.7
Jul. 9, 1999 (DE) 19932124.8
Jul. 9, 1999 (DE) 19932126.4
Jul. 9, 1999 (DE) 19932127.2
Jul. 9, 1999 (DE) 19932133.7
Jul. 9, 1999 (DE) 19932207.4
Jul. 9, 1999 (DE) 19932208.2
Jul. 9, 1999 (DE) 19932225.2
Jul. 9, 1999 (DE) 19932229.5
Jul. 9, 1999 (DE) 19932914.1
Jul. 9, 1999 (DE) 19933006.9
Aug. 27, 1999 (DE) 19940765.7
Aug. 27, 1999 (DE) 19940768.1
Aug. 27, 1999 (DE) 19940831.9
Aug. 27, 1999 (DE) 19940832.7
Aug. 31, 1999 (DE) 19941385.1
Aug. 31, 1999 (DE) 19941396.7
Sep. 3, 1999 (DE) 19942087.4

(51) Int. Cl. C12Q 1/68; C07H 21/04; C12P 13/04; C12N 9/10; C12N 1/21; C12N 15/74

(52) U.S. Cl. 435/106; 435/6; 435/69.1; 435/193; 435/252.3; 435/320.1; 536/23.2

(57) ABSTRACT

Isolated nucleic acid molecules, designated HA nucleic acid molecules, which encode novel HA proteins from Corynebacterium glutamicum are described. The invention also provides antisense nucleic acid molecules, recombinant expression vectors containing HA nucleic acid molecules, and host cells into which the expression vectors have been introduced. The invention still further provides isolated HA proteins, mutated HA proteins, fusion proteins, antigenic peptides and methods for the improvement of production of a desired compound from C. glutamicum based on genetic engineering of HA genes in this organism.

### RELATED APPLICATIONS

[0001] This application claims priority to prior filed U.S. Provisional Patent Application Ser. No. 60/141,031, filed Jun. 25, 1999, U.S. Provisional Patent Application Ser. No. 60/143,694, filed Jul. 14, 2000, and U.S. Provisional Patent Application Ser. No. 60/151,778, filed Aug. 31, 1999. This application also claims priority to German Application No. 19931418.7, filed Jul. 8, 1999, German Application No. 19932124.8, filed Jul. 9, 1999, German Application No. 19932126.4, filed Jul. 9, 1999, German Application No. 19932127.2, filed Jul. 9, 1999, German Application No. 19932133.7, filed Jul. 9, 1999, German Application No. 19932207.4, filed Jul. 9, 1999, German Application No. 19932208.2, filed Jul. 9, 1999, German Application No. 19932225.2, filed Jul. 9, 1999, German Application No. 19932229.5, filed Jul. 9, 1999, German Application No. 19932914.1, filed Jul. 9, 1999, German Application No. 19933006.9, filed Jul. 9, 1999, German Application No. 19940765.7, filed Aug. 27, 1999, German Application No. 19940768.1, filed Aug. 27, 1999, German Application No. 19940831.9, filed Aug. 27, 1999, German Application No. 19940832.7, filed Aug. 27, 1999, German Application No. 19941385.1, filed Aug. 31, 1999, German Application No. 19941396.7, filed Aug. 31, 1999, and German Application No. 19942087.4, filed Sep. 3, 1999. The entire contents of all of the aforementioned applications are hereby expressly incorporated herein by this reference.

### BACKGROUND OF THE INVENTION

[0002] Certain products and by-products of naturally-occurring metabolic processes in cells have utility in a wide array of industries, including the food, feed, cosmetics, and pharmaceutical industries. These molecules, collectively termed ‘fine chemicals’, include organic acids, both proteinogenic and non-proteinogenic amino acids, nucleotides and nucleosides, lipids and fatty acids, diols, carbohydrates, aromatic compounds, vitamins and cofactors, and enzymes. Their production is most conveniently performed through the large-scale culture of bacteria developed to produce and secrete large quantities of one or more desired molecules. One particularly useful organism for this purpose is Corynebacterium glutamicum, a gram positive, nonpathogenic bacterium. Through strain selection, a number of mutant strains have been developed which produce an array of desirable compounds. However, selection of strains improved for the production of a particular molecule is a time-consuming and difficult process.

### SUMMARY OF THE INVENTION

[0003] The invention provides novel bacterial nucleic acid molecules which have a variety of uses. These uses include the identification of microorganisms which can be used to produce fine chemicals, the modulation of fine chemical production in C. glutamicum or related bacteria, the typing or identification of C. glutamicum or related bacteria, as reference points for mapping the C. glutamicum genome, and as markers for transformation. These novel nucleic acid molecules encode proteins, referred to herein as homeostasis and adaptation (HA) proteins.

[0004] C. glutamicum is a gram positive, aerobic bacterium which is commonly used in industry for the large-scale production of a variety of fine chemicals, and also for the degradation of hydrocarbons (such as in petroleum spills) and for the oxidation of terpenoids. The HA nucleic acid molecules of the invention, therefore, can be used to identify microorganisms which can be used to produce fine chemicals, e.g., by fermentation processes. Modulation of the expression of the HA nucleic acids of the invention, or modification of the sequence of the HA nucleic acid molecules of the invention, can be used to modulate the production of one or more fine chemicals from a microorganism (e.g., to improve the yield or production of one or more fine chemicals from a Corynebacterium or Brevibacterium species).

[0005] The HA nucleic acids of the invention may also be used to identify an organism as being Corynebacterium glutamicum or a close relative thereof, or to identify the presence of C. glutamicum or a relative thereof in a mixed population of microorganisms. The invention provides the nucleic acid sequences of a number of C. glutamicum genes; by probing the extracted genomic DNA of a culture of a unique or mixed population of microorganisms under stringent conditions with a probe spanning a region of a C. glutamicum gene which is unique to this organism, one can ascertain whether this organism is present. Although Corynebacterium glutamicum itself is nonpathogenic, it is related to species pathogenic in humans, such as Corynebacterium diphtheriae (the causative agent of diphtheria); the detection of such organisms is of significant clinical relevance.

[0006] The HA nucleic acid molecules of the invention may also serve as reference points for mapping of the C. glutamicum genome, or of genomes of related organisms. Similarly, these molecules, or variants or portions thereof, may serve as markers for genetically engineered Corynebacterium or Brevibacterium species.

[0007] The HA proteins encoded by the novel nucleic acid molecules of the invention are capable of, for example, performing a function involved in the maintenance of homeostasis in C. glutamicum, or in the ability of this microorganism to adapt to different environmental conditions. Given the availability of cloning vectors for use in Corynebacterium glutamicum, such as those disclosed in Sinskey et al., U.S. Pat. No. 4,649,119, and techniques for genetic manipulation of C. glutamicum and the related Brevibacterium species (e.g., lactofermentum) (Yoshihama et al, J. Bacteriol. 162: 591-597 (1985); Katsumata et al., J. Bacteriol. 159: 306-311 (1984); and Santamaria et al., J. Gen. Microbiol. 130: 2237-2246 (1984)), the nucleic acid molecules of the invention may be utilized in the genetic engineering of this organism to make it a better or more efficient producer of one or more fine chemicals. This improved production or efficiency of production of a fine chemical may be due to a direct effect of manipulation of a gene of the invention, or it may be due to an indirect effect of such manipulation.

[0008] There are a number of mechanisms by which the alteration of an HA protein of the invention may directly affect the yield, production, and/or efficiency of production of a fine chemical from a C. glutamicum strain incorporating such an altered protein. For example, by engineering enzymes which modify or degrade aromatic or aliphatic compounds such that these enzymes are increased or decreased in activity or number, it may be possible to modulate the production of one or more fine chemicals which are the modification or degradation products of these compounds. Similarly, enzymes involved in the metabolism of inorganic compounds provide key molecules (e.g. phosphorous, sulfur, and nitrogen molecules) for the biosynthesis of such fine chemicals as amino acids, vitamins, and nucleic acids. By altering the activity or number of these enzymes in C. glutamicum, it may be possible to increase the conversion of these inorganic compounds (or to use alternate inorganic compounds) to thus permit improved rates of incorporation of inorganic atoms into these fine chemicals. Genetic engineering of C. glutamicum enzymes involved in general cellular processes may also directly improve fine chemical production, since many of these enzymes directly modify fine chemicals (e.g., amino acids) or the enzymes which are involved in fine chemical synthesis or secretion. Modulation of the activity or number of cellular proteases may also have a direct effect on fine chemical production, since many proteases may degrade fine chemicals or enzymes involved in fine chemical production or breakdown.

[0009] Further, the aforementioned enzymes which participate in aromatic/aliphatic compound modification or degradation, general biocatalysis, inorganic compound metabolism or proteolysis are each themselves fine chemicals, desirable for their activity in various in vitro industrial applications. By altering the number of copies of the gene for one or more of these enzymes in C. glutamicum it may be possible to increase the number of these proteins produced by the cell, thereby increasing the potential yield or efficiency of production of these proteins from large-scale C. glutamicum or related bacterial cultures.

[0010] The alteration of an HA protein of the invention may also indirectly affect the yield, production, and/or efficiency of production of a fine chemical from a C. glutamicum strain incorporating such an altered protein. For example, by modulating the activity and/or number of those proteins involved in the construction or rearrangement of the cell wall, it may be possible to modify the structure of the cell wall itself such that the cell is able to better withstand the mechanical and other stresses present during large-scale fermentative culture. Also, large-scale growth of C. glutamicum requires significant cell wall production. Modulation of the activity or number of cell wall biosynthetic or degradative enzymes may allow more rapid rates of cell wall biosynthesis, which in turn may permit increased growth rates of this microorganism in culture and thereby increase the number of cells producing the desired fine chemical.

[0011] By modifying the HA enzymes of the invention, one may also indirectly impact the yield, production, or efficiency of production of one or more fine chemicals from C. glutamicum. For example, many of the general enzymes in C. glutamicum may have a significant impact on global cellular processes (e.g., regulatory processes) which in turn have a significant effect on fine chemical metabolism. Similarly, proteases, enzymes which modify or degrade possibly toxic aromatic or aliphatic compounds, and enzymes which promote the metabolism of inorganic compounds all serve to increase the viability of C. glutamicum. The proteases aid in the selective removal of misfolded or misregulated proteins, such as those that might occur under the relatively stressful environmental conditions encountered during large-scale fermentor culture. By altering these proteins, it may be possible to further enhance this activity and to improve the viability of C. glutamicum in culture. The aromatic/aliphatic modification or degradation proteins not only serve to detoxify these waste compounds (which may be encountered as impurities in culture medium or as waste products from cells themselves), but also to permit the cells to utilize alternate carbon sources if the optimal carbon source is limiting in the culture. By increasing their number and/or activity, the survival of C. glutamicum cells in culture may be enhanced. The inorganic metabolism proteins of the invention supply the cell with inorganic molecules required for all protein and nucleotide (among others) synthesis, and thus are critical for the overall viability of the cell. An increase in the number of viable cells producing one or more desired fine chemicals in large-scale culture should result in a concomitant increase in the yield, production, and/or efficiency of production of the fine chemical in the culture.

[0012] The invention provides novel nucleic acid molecules which encode proteins, referred to herein as HA proteins, which are capable of, for example, performing a function involved in the maintenance of homeostasis in C. glutamicum, or of participating in the ability of this microorganism to adapt to different environmental conditions. Nucleic acid molecules encoding an HA protein are referred to herein as HA nucleic acid molecules. In a preferred embodiment, an HA protein participates in C. glutamicum cell wall biosynthesis or rearrangements, metabolism of inorganic compounds, modification or degradation of aromatic or aliphatic compounds, or possesses a C. glutamicum enzymatic or proteolytic activity. Examples of such proteins include those encoded by the genes set forth in Table 1.

[0013] Accordingly, one aspect of the invention pertains to isolated nucleic acid molecules (e.g., cDNAs, DNAs, or RNAs) comprising a nucleotide sequence encoding an HA protein or biologically active portions thereof, as well as nucleic acid fragments suitable as primers or hybridization probes for the detection or amplification of HA-encoding nucleic acids (e.g., DNA or mRNA). In particularly preferred embodiments, the isolated nucleic acid molecule comprises one of the nucleotide sequences set forth in Appendix A or the coding region or a complement thereof of one of these nucleotide sequences. In other particularly preferred embodiments, the isolated nucleic acid molecule of the invention comprises a nucleotide sequence which hybridizes to or is at least about 50%, preferably at least about 60%, more preferably at least about 70%, 80% or 90%, and even more preferably at least about 95%, 96%, 97%, 98%, 99% or more homologous to a nucleotide sequence set forth in Appendix A, or a portion thereof. In other preferred embodiments, the isolated nucleic acid molecule encodes one of the amino acid sequences set forth in Appendix B. The preferred HA proteins of the present invention also preferably possess at least one of the HA activities described herein.

[0014] In another embodiment, the isolated nucleic acid molecule encodes a protein or portion thereof wherein the protein or portion thereof includes an amino acid sequence which is sufficiently homologous to an amino acid sequence of Appendix B, e.g., sufficiently homologous to an amino acid sequence of Appendix B such that the protein or portion thereof maintains an HA activity. Preferably, the protein or portion thereof encoded by the nucleic acid molecule maintains the ability to participate in the maintenance of homeostasis in C. glutamicum, or to perform a function involved in the adaptation of this microorganism to different environmental conditions. In one embodiment, the protein encoded by the nucleic acid molecule is at least about 50%, preferably at least about 60%, and more preferably at least about 70%, 80%, or 90% and most preferably at least about 95%, 96%, 97%, 98%, or 99% or more homologous to an amino acid sequence of Appendix B (e.g., an entire amino acid sequence selected from those sequences set forth in Appendix B). In another preferred embodiment, the protein is a full length C. glutamicum protein which is substantially homologous to an entire amino acid sequence of Appendix B (encoded by an open reading frame shown in Appendix A).

[0015] In another preferred embodiment, the isolated nucleic acid molecule is derived from C. glutamicum and encodes a protein (e.g., an HA fusion protein) which includes a biologically active domain which is at least about 50% or more homologous to one of the amino acid sequences of Appendix B and is able to participate in the repair or recombination of DNA, in the transposition of genetic material, in gene expression (i.e., the processes of transcription or translation), in protein folding, or in protein secretion in Corynebacterium glutamicum, or has one or more of the activities set forth in Table 1, and which also includes heterologous nucleic acid sequences encoding a heterologous polypeptide or regulatory regions.

[0016] In another embodiment, the isolated nucleic acid molecule is at least 15 nucleotides in length and hybridizes under stringent conditions to a nucleic acid molecule comprising a nucleotide sequence of Appendix A. Preferably, the isolated nucleic acid molecule corresponds to a naturally-occurring nucleic acid molecule. More preferably, the isolated nucleic acid encodes a naturally-occurring C. glutamicum HA protein, or a biologically active portion thereof.

[0017] Another aspect of the invention pertains to vectors, e.g., recombinant expression vectors, containing the nucleic acid molecules of the invention, and host cells into which such vectors have been introduced. In one embodiment, such a host cell is used to produce an HA protein by culturing the host cell in a suitable medium. The HA protein can be then isolated from the medium or the host cell.

[0018] Yet another aspect of the invention pertains to a genetically altered microorganism in which an HA gene has been introduced or altered. In one embodiment, the genome of the microorganism has been altered by introduction of a nucleic acid molecule of the invention encoding wild-type or mutated HA sequence as a transgene. In another embodiment, an endogenous HA gene within the genome of the microorganism has been altered, e.g., functionally disrupted, by homologous recombination with an altered HA gene. In another embodiment, an endogenous or introduced HA gene in a microorganism has been altered by one or more point mutations, deletions, or inversions, but still encodes a functional HA protein. In still another embodiment, one or more of the regulatory regions (e.g., a promoter, repressor, or inducer) of an HA gene in a microorganism has been altered (e.g., by deletion, truncation, inversion, or point mutation) such that the expression of the HA gene is modulated. In a preferred embodiment, the microorganism belongs to the genus Corynebacterium or Brevibacterium, with Corynebacterium glutamicum being particularly preferred. In a preferred embodiment, the microorganism is also utilized for the production of a desired compound, such as an amino acid, with lysine being particularly preferred.

[0019] In another aspect, the invention provides a method of identifying the presence or activity of Cornyebacterium diphtheriae in a subject. This method includes detection of one or more of the nucleic acid or amino acid sequences of the invention (e.g., the sequences set forth in Appendix A or Appendix B) in a subject, thereby detecting the presence or activity of Corynebacterium diphtheriae in the subject.

[0020] Still another aspect of the invention pertains to an isolated HA protein or a portion, e.g., a biologically active portion, thereof. In a preferred embodiment, the isolated HA protein or portion thereof can participate in the maintenance of homeostasis in C. glutamicum, or can perform a function involved in the adaptation of this microorganism to different environmental conditions. In another preferred embodiment, the isolated HA protein or portion thereof is sufficiently homologous to an amino acid sequence of Appendix B such that the protein or portion thereof maintains the ability to participate in the maintenance of homeostasis in C. glutamicum, or to perform a function involved in the adaptation of this microorganism to different environmental conditions.

[0021] The invention also provides an isolated preparation of an HA protein. In preferred embodiments, the HA protein comprises an amino acid sequence of Appendix B. In another preferred embodiment, the invention pertains to an isolated full length protein which is substantially homologous to an entire amino acid sequence of Appendix B (encoded by an open reading frame set forth in Appendix A). In yet another embodiment, the protein is at least about 50%, preferably at least about 60%, and more preferably at least about 70%, 80%, or 90%, and most preferably at least about 95%, 96%, 97%, 98%, or 99% or more homologous to an entire amino acid sequence of Appendix B. In other embodiments, the isolated HA protein comprises an amino acid sequence which is at least about 50% or more homologous to one of the amino acid sequences of Appendix B and is able to participate in the maintenance of homeostasis in C. glutamicum, or to perform a function involved in the adaptation of this microorganism to different environmental conditions, or has one or more of the activities set forth in Table 1.

[0022] Alternatively, the isolated HA protein can comprise an amino acid sequence which is encoded by a nucleotide sequence which hybridizes, e.g., hybridizes under stringent conditions, or is at least about 50%, preferably at least about 60%, more preferably at least about 70%, 80%, or 90%, and even more preferably at least about 95%, 96%, 97%, 98,%, or 99% or more homologous, to a nucleotide sequence of Appendix B. It is also preferred that the preferred forms of HA proteins also have one or more of the HA bioactivities described herein.

[0023] The HA polypeptide, or a biologically active portion thereof, can be operatively linked to a non-HA polypeptide to form a fusion protein. In preferred embodiments, this fusion protein has an activity which differs from that of the HA protein alone. In other preferred embodiments, this fusion protein participates in the maintenance of homeostasis in C. glutamicum, or performs a function involved in the adaptation of this microorganism to different environmental conditions. In particularly preferred embodiments, integration of this fusion protein into a host cell modulates production of a desired compound from the cell.

[0024] In another aspect, the invention provides methods for screening molecules which modulate the activity of an HA protein, either by interacting with the protein itself or a substrate or binding partner of the HA protein, or by modulating the transcription or translation of an HA nucleic acid molecule of the invention.

[0025] Another aspect of the invention pertains to a method for producing a fine chemical. This method involves the culturing of a cell containing a vector directing the expression of an HA nucleic acid molecule of the invention, such that a fine chemical is produced. In a preferred embodiment, this method further includes the step of obtaining a cell containing such a vector, in which a cell is transfected with a vector directing the expression of an HA nucleic acid. In another preferred embodiment, this method further includes the step of recovering the fine chemical from the culture. In a particularly preferred embodiment, the cell is from the genus Corynebacterium or Brevibacterium, or is selected from those strains set forth in Table 3.

[0026] Another aspect of the invention pertains to methods for modulating production of a molecule from a microorganism. Such methods include contacting the cell with an agent which modulates HA protein activity or HA nucleic acid expression such that a cell associated activity is altered relative to this same activity in the absence of the agent. In a preferred embodiment, the cell is modulated for one or more C. glutamicum processes involved in cell wall biosynthesis or rearrangements, metabolism of inorganic compounds, modification or degradation of aromatic or aliphatic compounds, or enzymatic or proteolytic activities. The agent which modulates HA protein activity can be an agent which stimulates HA protein activity or HA nucleic acid expression. Examples of agents which stimulate HA protein activity or HA nucleic acid expression include small molecules, active HA proteins, and nucleic acids encoding HA proteins that have been introduced into the cell. Examples of agents which inhibit HA activity or expression include small molecules and antisense HA nucleic acid molecules.

[0027] Another aspect of the invention pertains to methods for modulating yields of a desired compound from a cell, involving the introduction of a wild-type or mutant HA gene into a cell, either maintained on a separate plasmid or integrated into the genome of the host cell. If integrated into the genome, such integration can be random, or it can take place by homologous recombination such that the native gene is replaced by the introduced copy, causing the production of the desired compound from the cell to be modulated. In a preferred embodiment, said yields are increased. In another preferred embodiment, said chemical is a fine chemical. In a particularly preferred embodiment, said fine chemical is an amino acid. In especially preferred embodiments, said amino acid is L-lysine.

### DETAILED DESCRIPTION OF THE INVENTION

[0028] The present invention provides HA nucleic acid and protein molecules which are involved in C. glutamicum cell wall biosynthesis or rearrangements, metabolism of inorganic compounds, modification or degradation of aromatic or aliphatic compounds, or that have a C. glutamicum enzymatic or proteolytic activity. The molecules of the invention may be utilized in the modulation of production of fine chemicals from microorganisms, such as C. glutamicum, either directly (e.g., where overexpression or optimization of activity of a protein involved in the production of a fine chemical (e.g., an enzyme) has a direct impact on the yield, production, and/or efficiency of production of a fine chemical from the modified C. glutamicum), or an indirect impact which nonetheless results in an increase of yield, production, and/or efficiency of production of the desired compound (e.g., where modulation of the activity or number of copies of a C. glutamicum aromatic or aliphatic modification or degradation protein results in an increase in the viability of C. glutamicum cells, which in turn permits increased production in a large-scale culture setting). Aspects of the invention are further explicated below.

I. Fine Chemicals

[0029] The term ‘fine chemical’ is art-recognized and includes molecules produced by an organism which have applications in various industries, such as, but not limited to, the pharmaceutical, agriculture, and cosmetics industries. Such compounds include organic acids, such as tartaric acid, itaconic acid, and diaminopimelic acid, both proteinogenic and non-proteinogenic amino acids, purine and pyrimidine bases, nucleosides, and nucleotides (as described e.g. in Kuninaka, A. (1996) Nucleotides and related compounds, p. 561-612, in Biotechnology vol. 6, Rehm et al., eds. VCH: Weinheim, and references contained therein), lipids, both saturated and unsaturated fatty acids (e.g., arachidonic acid), diols (e.g., propane diol, and butane diol), carbohydrates (e.g., hyaluronic acid and trehalose), aromatic compounds (e.g., aromatic amines, vanillin, and indigo), vitamins and cofactors (as described in Ullmann's Encyclopedia of Industrial Chemistry, vol. A27, “Vitamins”, p. 443-613 (1996) VCH: Weinheim and references therein; and Ong, A. S., Niki, E. & Packer, L. (1995) “Nutrition, Lipids, Health, and Disease” Proceedings of the UNESCO/Confederation of Scientific and Technological Associations in Malaysia, and the Society for Free Radical Research—Asia, held Sep. 1-3, 1994 at Penang, Malaysia, AOCS Press, (1995)), enzymes, polyketides (Cane et al. (1998) Science 282: 63-68), and all other chemicals described in Gutcho (1983) Chemicals by Fermentation, Noyes Data Corporation, ISBN: 0818805086 and references therein. The metabolism and uses of certain of these fine chemicals are further explicated below.

A. Amino Acid Metabolism and Uses

[0030] Amino acids comprise the basic structural units of all proteins, and as such are essential for normal cellular functioning in all organisms. The term “amino acid” is art-recognized. The proteinogenic amino acids, of which there are 20 species, serve as structural units for proteins, in which they are linked by peptide bonds, while the nonproteinogenic amino acids (hundreds of which are known) are not normally found in proteins (see Ulmann's Encyclopedia of Industrial Chemistry, vol. A2, p. 57-97 VCH: Weinheim (1985)). Amino acids may be in the D- or L-optical configuration, though L-amino acids are generally the only type found in naturally-occurring proteins. Biosynthetic and degradative pathways of each of the 20 proteinogenic amino acids have been well characterized in both prokaryotic and eukaryotic cells (see, for example, Stryer, L. Biochemistry, 3^{rd} edition, pages 578-590 (1988)). The ‘essential’ amino acids (histidine, isoleucine, leucine, lysine, methionine, phenylalanine, threonine, tryptophan, and valine), so named because they are generally a nutritional requirement due to the complexity of their biosyntheses, are readily converted by simple biosynthetic pathways to the remaining 11 ‘nonessential’ amino acids (alanine, arginine, asparagine, aspartate, cysteine, glutamate, glutamine, glycine, proline, serine, and tyrosine). Higher animals do retain the ability to synthesize some of these amino acids, but the essential amino acids must be supplied from the diet in order for normal protein synthesis to occur.

[0031] Aside from their function in protein biosynthesis, these amino acids are interesting chemicals in their own right, and many have been found to have various applications in the food, feed, chemical, cosmetics, agriculture, and pharmaceutical industries. Lysine is an important amino acid in the nutrition not only of humans, but also of monogastric animals such as poultry and swine. Glutamate is most commonly used as a flavor additive (mono-sodium glutamate, MSG) and is widely used throughout the food industry, as are aspartate, phenylalanine, glycine, and cysteine. Glycine, L-methionine and tryptophan are all utilized in the pharmaceutical industry. Glutamine, valine, leucine, isoleucine, histidine, arginine, proline, serine and alanine are of use in both the pharmaceutical and cosmetics industries. Threonine, tryptophan, and D/L-methionine are common feed additives. (Leuchtenberger, W. (1996) Amino aids—technical production and use, p. 466-502 in Rehm et al. (eds.) Biotechnology vol. 6, chapter 14a, VCH: Weinheim). Additionally, these amino acids have been found to be useful as precursors for the synthesis of synthetic amino acids and proteins, such as N-acetylcysteine, S-carboxymethyl-L-cysteine, (S)-5-hydroxytryptophan, and others described in Ulmann's Encyclopedia of Industrial Chemistry, vol. A2, p. 57-97, VCH: Weinheim, 1985.

[0032] The biosynthesis of these natural amino acids in organisms capable of producing them, such as bacteria, has been well characterized (for review of bacterial amino acid biosynthesis and regulation thereof, see Umbarger, H. E. (1978) Ann. Rev. Biochem. 47: 533-606). Glutamate is synthesized by the reductive amination of α-ketoglutarate, an intermediate in the citric acid cycle. Glutamine, proline, and arginine are each subsequently produced from glutamate. The biosynthesis of serine is a three-step process beginning with 3-phosphoglycerate (an intermediate in glycolysis), and resulting in this amino acid after oxidation, transamination, and hydrolysis steps. Both cysteine and glycine are produced from serine; the former by the condensation of homocysteine with serine, and the latter by the transferal of the side-chain β-carbon atom to tetrahydrofolate, in a reaction catalyzed by serine transhydroxymethylase. Phenylalanine, and tyrosine are synthesized from the glycolytic and pentose phosphate pathway precursors erythrose 4-phosphate and phosphoenolpyruvate in a 9-step biosynthetic pathway that differ only at the final two steps after synthesis of prephenate. Tryptophan is also produced from these two initial molecules, but its synthesis is an 11-step pathway. Tyrosine may also be synthesized from phenylalanine, in a reaction catalyzed by phenylalanine hydroxylase. Alanine, valine, and leucine are all biosynthetic products of pyruvate, the final product of glycolysis. Aspartate is formed from oxaloacetate, an intermediate of the citric acid cycle. Asparagine, methionine, threonine, and lysine are each produced by the conversion of aspartate. Isoleucine is formed from threonine. A complex 9-step pathway results in the production of histidine from 5-phosphoribosyl-1-pyrophosphate, an activated sugar.

[0033] Amino acids in excess of the protein synthesis needs of the cell cannot be stored, and are instead degraded to provide intermediates for the major metabolic pathways of the cell (for review see Stryer, L. Biochemistry 3^{rd} ed. Ch. 21 “Amino Acid Degradation and the Urea Cycle” p. 495-516 (1988)). Although the cell is able to convert unwanted amino acids into useful metabolic intermediates, amino acid production is costly in terms of energy, precursor molecules, and the enzymes necessary to synthesize them. Thus it is not surprising that amino acid biosynthesis is regulated by feedback inhibition, in which the presence of a particular amino acid serves to slow or entirely stop its own production (for overview of feedback mechanisms in amino acid biosynthetic pathways, see Stryer, L. Biochemistry, 3^{rd} ed. Ch. 24: “Biosynthesis of Amino Acids and Heme” p. 575-600 (1988)). Thus, the output of any particular amino acid is limited by the amount of that amino acid present in the cell.

B. Vitamin, Cofactor, and Nutraceutical Metabolism and Uses

[0034] Vitamins, cofactors, and nutraceuticals comprise another group of molecules which the higher animals have lost the ability to synthesize and so must ingest, although they are readily synthesized by other organisms such as bacteria. These molecules are either bioactive substances themselves, or are precursors of biologically active substances which may serve as electron carriers or intermediates in a variety of metabolic pathways. Aside from their nutritive value, these compounds also have significant industrial value as coloring agents, antioxidants, and catalysts or other processing aids. (For an overview of the structure, activity, and industrial applications of these compounds, see, for example, Ullman's Encyclopedia of Industrial Chemistry, “Vitamins” vol. A27, p. 443-613, VCH: Weinheim, 1996.) The term “vitamin” is art-recognized, and includes nutrients which are required by an organism for normal functioning, but which that organism cannot synthesize by itself. The group of vitamins may encompass cofactors and nutraceutical compounds. The language “cofactor” includes nonproteinaceous compounds required for a normal enzymatic activity to occur. Such compounds may be organic or inorganic; the cofactor molecules of the invention are preferably organic. The term “nutraceutical” includes dietary supplements having health benefits in plants and animals, particularly humans. Examples of such molecules are vitamins, antioxidants, and also certain lipids (e.g., polyunsaturated fatty acids).

[0035] The biosynthesis of these molecules in organisms capable of producing them, such as bacteria, has been largely characterized (Ullman's Encyclopedia of Industrial Chemistry, “Vitamins” vol. A27, p. 443-613, VCH: Weinheim, 1996; Michal, G. (1999) Biochemical Pathways: An Atlas of Biochemistry and Molecular Biology, John Wiley & Sons; Ong, A. S., Niki, E. & Packer, L. (1995) “Nutrition, Lipids, Health, and Disease” Proceedings of the UNESCO/Confederation of Scientific and Technological Associations in Malaysia, and the Society for Free Radical Research—Asia, held Sep. 1-3, 1994 at Penang, Malaysia, AOCS Press: Champaign, Ill. X, 374 S).

[0036] Thiamin (vitamin B₁) is produced by the chemical coupling of pyrimidine and thiazole moieties. Riboflavin (vitamin B₂) is synthesized from guanosine-5′-triphosphate (GTP) and ribose-5′-phosphate. Riboflavin, in turn, is utilized for the synthesis of flavin mononucleotide (FMN) and flavin adenine dinucleotide (FAD). The family of compounds collectively termed ‘vitamin B₆’ (e.g., pyridoxine, pyridoxamine, pyridoxa-5′-phosphate, and the commercially used pyridoxin hydrochloride) are all derivatives of the common structural unit, 5-hydroxy-6-methylpyridine. Pantothenate (pantothenic acid, (R)-(+)-N-(2,4-dihydroxy-3,3-dimethyl-1-oxobutyl)-β-alanine) can be produced either by chemical synthesis or by fermentation. The final steps in pantothenate biosynthesis consist of the ATP-driven condensation of β-alanine and pantoic acid. The enzymes responsible for the biosynthesis steps for the conversion to pantoic acid, to β-alanine and for the condensation to panthotenic acid are known. The metabolically active form of pantothenate is Coenzyme A, for which the biosynthesis proceeds in 5 enzymatic steps. Pantothenate, pyridoxal-5′-phosphate, cysteine and ATP are the precursors of Coenzyme A. These enzymes not only catalyze the formation of panthothante, but also the production of (R)-pantoic acid, (R)-pantolacton, (R)-panthenol (provitamin B₅), pantetheine (and its derivatives) and coenzyme A.

[0037] Biotin biosynthesis from the precursor molecule pimeloyl-CoA in microorganisms has been studied in detail and several of the genes involved have been identified. Many of the corresponding proteins have been found to also be involved in Fe-cluster synthesis and are members of the nifS class of proteins. Lipoic acid is derived from octanoic acid, and serves as a coenzyme in energy metabolism, where it becomes part of the pyruvate dehydrogenase complex and the α-ketoglutarate dehydrogenase complex. The folates are a group of substances which are all derivatives of folic acid, which is turn is derived from L-glutamic acid, p-amino-benzoic acid and 6-methylpterin. The biosynthesis of folic acid and its derivatives, starting from the metabolism intermediates guanosine-5′-triphosphate (GTP), L-glutamic acid and p-amino-benzoic acid has been studied in detail in certain microorganisms.

[0038] Corrinoids (such as the cobalamines and particularly vitamin B₁₂) and porphyrines belong to a group of chemicals characterized by a tetrapyrole ring system. The biosynthesis of vitamin B₁₂ is sufficiently complex that it has not yet been completely characterized, but many of the enzymes and substrates involved are now known. Nicotinic acid (nicotinate), and nicotinamide are pyridine derivatives which are also termed ‘niacin’. Niacin is the precursor of the important coenzymes NAD (nicotinamide adenine dinucleotide) and NADP (nicotinamide adenine dinucleotide phosphate) and their reduced forms.

[0039] The large-scale production of these compounds has largely relied on cell-free chemical syntheses, though some of these chemicals have also been produced by large-scale culture of microorganisms, such as riboflavin, Vitamin B₆, pantothenate, and biotin. Only Vitamin B₁₂ is produced solely by fermentation, due to the complexity of its synthesis. In vitro methodologies require significant inputs of materials and time, often at great cost.

C. Purine, Pyrimidine, Nucleoside and Nucleotide Metabolism and Uses

[0040] Purine and pyrimidine metabolism genes and their corresponding proteins are important targets for the therapy of tumor diseases and viral infections. The language “purine” or “pyrimidine” includes the nitrogenous bases which are constituents of nucleic acids, co-enzymes, and nucleotides. The term “nucleotide” includes the basic structural units of nucleic acid molecules, which are comprised of a nitrogenous base, a pentose sugar (in the case of RNA, the sugar is ribose; in the case of DNA, the sugar is D-deoxyribose), and phosphoric acid. The language “nucleoside” includes molecules which serve as precursors to nucleotides, but which are lacking the phosphoric acid moiety that nucleotides possess. By inhibiting the biosynthesis of these molecules, or their mobilization to form nucleic acid molecules, it is possible to inhibit RNA and DNA synthesis; by inhibiting this activity in a fashion targeted to cancerous cells, the ability of tumor cells to divide and replicate may be inhibited. Additionally, there are nucleotides which do not form nucleic acid molecules, but rather serve as energy stores (i.e., AMP) or as coenzymes (i.e., FAD and NAD).

[0041] Several publications have described the use of these chemicals for these medical indications, by influencing purine and/or pyrimidine metabolism (e.g. Christopherson, R. I. and Lyons, S. D. (1990) “Potent inhibitors of de novo pyrimidine and purine biosynthesis as chemotherapeutic agents.” Med. Res. Reviews 10: 505-548). Studies of enzymes involved in purine and pyrimidine metabolism have been focused on the development of new drugs which can be used, for example, as immunosuppressants or anti-proliferants (Smith, J. L., (1995) “Enzymes in nucleotide synthesis.” Curr. Opin. Struct. Biol. 5: 752-757; (1995) Biochem Soc. Transact. 23: 877-902). However, purine and pyrimidine bases, nucleosides and nucleotides have other utilities: as intermediates in the biosynthesis of several fine chemicals (e.g., thiamine, S-adenosyl-methionine, folates, or riboflavin), as energy carriers for the cell (e.g., ATP or GTP), and for chemicals themselves, commonly used as flavor enhancers (e.g., IMP or GMP) or for several medicinal applications (see, for example, Kuninaka, A. (1996) Nucleotides and Related Compounds in Biotechnology vol. 6, Rehm et al., eds. VCH: Weinheim, p. 561-612). Also, enzymes involved in purine, pyrimidine, nucleoside, or nucleotide metabolism are increasingly serving as targets against which chemicals for crop protection, including fungicides, herbicides and insecticides, are developed.

[0042] The metabolism of these compounds in bacteria has been characterized (for reviews see, for example, Zalkin, H. and Dixon, J. E. (1992) “de novo purine nucleotide biosynthesis”, in: Progress in Nucleic Acid Research and Molecular Biology, vol. 42, Academic Press:, p. 259-287; and Michal, G. (1999) “Nucleotides and Nucleosides”, Chapter 8 in: Biochemical Pathways: An Atlas of Biochemistry and Molecular Biology, Wiley: New York). Purine metabolism has been the subject of intensive research, and is essential to the normal functioning of the cell. Impaired purine metabolism in higher animals can cause severe disease, such as gout. Purine nucleotides are synthesized from ribose-5-phosphate, in a series of steps through the intermediate compound inosine-5′-phosphate (IMP), resulting in the production of guanosine-5′-monophosphate (GMP) or adenosine-5′-monophosphate (AMP), from which the triphosphate forms utilized as nucleotides are readily formed. These compounds are also utilized as energy stores, so their degradation provides energy for many different biochemical processes in the cell. Pyrimidine biosynthesis proceeds by the formation of uridine-5′-monophosphate (UMP) from ribose-5-phosphate. UMP, in turn, is converted to cytidine-5′-triphosphate (CTP). The deoxy-forms of all of these nucleotides are produced in a one step reduction reaction from the diphosphate ribose form of the nucleotide to the diphosphate deoxyribose form of the nucleotide. Upon phosphorylation, these molecules are able to participate in DNA synthesis.

D. Trehalose Metabolism and Uses

[0043] Trehalose consists of two glucose molecules, bound in α, α-1,1 linkage. It is commonly used in the food industry as a sweetener, an additive for dried or frozen foods, and in beverages. However, it also has applications in the pharmaceutical, cosmetics and biotechnology industries (see, for example, Nishimoto et al., (1998) U.S. Pat. No. 5,759,610; Singer, M. A. and Lindquist, S. (1998) Trends Biotech. 16: 460-467; Paiva, C. L. A. and Panek, A. D. (1996) Biotech. Ann. Rev. 2: 293-314; and Shiosaka, M. (1997) J. Japan 172: 97-102). Trehalose is produced by enzymes from many microorganisms and is naturally released into the surrounding medium, from which it can be collected using methods known in the art.

II. Maintenance of Homeostasis in C. Glutamicum and Environmental Adaptation

[0044] The metabolic and other biochemical processes by which cells function are sensitive to environmental conditions such as temperature, pressure, solute concentration, and availability of oxygen. When one or more such environmental condition is perturbed or altered in a fashion that is incompatible with the normal functioning of these cellular processes, the cell must act to maintain an intracellular environment which will permit them to occur despite the hostile extracellular environment. Gram positive bacterial cells, such as C. glutamicum cells, have a number of mechanisms by which internal homeostasis may be maintained despite unfavorable extracellular conditions. These include a cell wall, proteins which are able to degrade possibly toxic aromatic and aliphatic compounds, mechanisms of proteolysis whereby misfolded or misregulated proteins may be rapidly destroyed, and catalysts which permit intracellular reactions to occur which would not normally take place under the conditions optimal for bacterial growth.

[0045] Aside from merely surviving in a hostile environment, bacterial cells (e.g. C. glutamicum cells) are also frequently able to adapt such that they are able to take advantage of such conditions. For example, cells in an environment lacking desired carbon sources may be able to adapt to growth on a less-suitable carbon source. Also, cells may be able to utilize less desirable inorganic compounds when the commonly utilized ones are unavailable. C. glutamicum cells possess a number of genes which permit them to adapt to utilize inorganic and organic molecules which they would normally not encounter under optimal growth conditions as nutrients and precursors for metabolism. Aspects of cellular processes involved in homeostasis and adaptation are further explicated below.

A. Modification and Degradation of Aromatic and Aliphatic Compounds

[0046] Bacterial cells are routinely exposed to a variety of aromatic and aliphatic compounds in nature. Aromatic compounds are organic molecules having a cyclic ring structure, while aliphatic compounds are organic molecules having open chain structures rather than ring structures. Such compounds may arise as by-products of industrial processes (e.g., benzene or toluene), but may also be produced by certain microorganisms (e.g., alcohols). Many of these compounds are toxic to cells, particularly the aromatic compounds, which are highly reactive due to the high-energy ring structure. Thus, certain bacteria have developed mechanisms by which they are able to modify or degrade these compounds such that they are no longer hazardous to the cell. Cells may possess enzymes that are able to, for example, hydroxylate, isomerize, or methylate aromatic or aliphatic compounds such that they are either rendered less toxic, or such that the modified form is able to be processed by standard cellular waste and degradation pathways. Also, cells may possess enzymes which are able to specifically degrade one or more such potentially hazardous substance, thereby protecting the cell. Principles and examples of these types of modification and degradation processes in bacteria are described in several publications, e.g., Sahm, H. (1999) “Procaryotes in Industrial Production” in Lengeler, J. W. et al., eds. Biology of the Procaryotes, Thieme Verlag: Stuttgart; and Schlegel, H. G. (1992) Allgemeine Mikrobiologie, Thieme: Stuttgart).

[0047] Aside from simply inactivating hazardous aromatic or aliphatic compounds, many bacteria have evolved to be able to utilize these compounds as carbon sources for continued metabolism when the preferred carbon sources of the cell are not available. For example, Pseudomonas strains able to utilize toluene, benzene, and 1,10-dichlorodecane as carbon sources are known (Chang, B. V. et al. (1997) Chemosphere 35(12): 2807-2815; Wischnak, C. et al. (1998) Appl. Environ. Microbiol. 64(9): 3507-3511; Churchill, S. A. et al. (1999) Appl. Environ. Microbiol. 65(2): 549-552). There are similar examples from many other bacterial species which are known in the art.

[0048] The ability of certain bacteria to modify or degrade aromatic and aliphatic compounds has begun to be exploited. Petroleum is a complex mixture of chemicals which includes aliphatic molecules and aromatic compounds. By applying bacteria having the ability to degrade or modify these toxic compounds to an oil spill, for example, it is possible to eliminate much of the environmental damage with high efficiency and low cost (see, for example, Smith, M. R. (1990) “The biodegradation of aromatic hydrocarbons by bacteria” Biodegradation 1(2-3): 191-206; and Suyama, T. et al. (1998) “Bacterial isolates degrading aliphatic polycarbonates,” FEMS Microbiol. Lett. 161(2): 255-261).

B. Metabolism of Inorganic Compounds

[0049] Cells (e.g., bacterial cells) contain large quantities of different molecules, such as water, inorganic ions, and organic substances (e.g., proteins, sugars, and other macromolecules). The bulk of the mass of a typical cell consists of only 4 types of atoms: carbon, oxygen, hydrogen, and nitrogen. Although they represent a smaller percentage of the content of a cell, inorganic substances are equally as important to the proper functioning of the cell. Such molecules include phosphorous, sulfur, calcium, magnesium, iron, zinc, manganese, copper, molybdenum, tungsten, and cobalt. Many of these compounds are critical for the construction of important molecules, such as nucleotides (phosphorous) and amino acids (nitrogen and sulfur). Others of these inorganic ions serve as cofactors for enzymic reactions or contribute to osmotic pressure. All such molecules must be taken up by the bacterium from the surrounding environment.

[0050] For each of these inorganic compounds it is desirable for the bacterium to take up the form which can be most readily used by the standard metabolic machinery of the cell. However, the bacterium may encounter environments in which these preferred forms are not readily available. In order to survive under these circumstances, it is important for bacteria to have additional biochemical mechanisms which are able to convert less metabolically active but readily available forms of these inorganic compounds to ones which may be used in cellular metabolism. Bacteria frequently possess a number of genes encoding enzymes for this purpose, which are not expressed unless the desired inorganic species are not available. Thus, these genes for the metabolism of various inorganic compounds serve as another tool which bacteria may use to adapt to suboptimal environmental conditions.

[0051] After carbon, the most important element in the cell is nitrogen. A typical bacterial cell contains between 12-15% nitrogen. It is a constituent of amino acids and nucleotides, as well as many other important molecules in the cell. Further, nitrogen may serve as a substitute for oxygen as a terminal electron acceptor in energy metabolism. Good sources of nitrogen include many organic and inorganic compounds, such ammonia gas or ammonia salts (e.g., NH₄Cl, (NH₄)₂SO₄, or NH₄OH), nitrates, urea, amino acids, or complex nitrogen sources like corn steep liquor, soy bean flour, soy bean protein, yeast extract, meat extract, etc. Ammonia nitrogen is fixed by the action of particular enzymes: glutamate dehydrogenase, glutamine synthase, and glutamine-2-oxoglutarate aminotransferase. The transfer of amino-nitrogen from one organic molecule to another is accomplished by the aminotransferases, a class of enzymes which transfer one amino group from an alpha-amino acid to an alpha-keto acid. Nitrate may be reduced via nitrate reductase, nitrite reductase, and further redox enzymes until it is converted to molecular nitrogen or ammonia, which may be readily utilized by the cell in standard metabolic pathways.

[0052] Phosphorous is typically found intracellularly in both organic and inorganic forms, and may be taken up by the cell in either of these forms as well, though most microorganisms preferentially take up inorganic phosphate. The conversion of organic phosphate to a form which the cell can utilize requires the action of phosphatases (e.g., phytases, which hydrolyze phyate-yielding phosphate and inositol derivatives). Phosphate is a key element in the synthesis of nucleic acids, and also has a significant role in cellular energy metabolism (e.g., in the synthesis of ATP, ADP, and AMP).

[0053] Sulfur is a requirement for the synthesis of amino acids (e.g., methionine and cysteine), vitamins (e.g., thiamine, biotin, and lipoic acid) and iron sulfur proteins. Bacteria obtain sulfur primarily from inorganic sulfate, though thiosulfate, sulfite, and sulfide are also commonly utilized. Under conditions where these compounds may not be readily available, many bacteria express genes which enable them to utilize sulfonate compounds such as 2-aminosulfonate (taurine) (Kertesz, M. A. (1993) “Proteins induced by sulfate limitation in Escherichia coli, Pseudomonas putida, or Staphylococcus aureus.” J. Bacteriol. 175: 1187-1190).

[0054] Other inorganic atoms, e.g., metal or calcium ions, are also critical for the viability of cells. Iron, for example, plays a key role in redox reactions and is a cofactor of iron-sulfur proteins, heme proteins, and cytochromes. The uptake of iron into bacterial cells may be accomplished by the action of siderophores, chelating agents which bind extracellular iron ions and translocate them to the interior of the cell. For reference on the metabolism of iron and other inorganic compounds, see: Lengeler et al. (1999) Biology of Prokaryotes, Thieme Verlag: Stuttgart; Neidhardt, F. C. et al., eds. Escherichia coli and Salmonella. ASM Press: Washington, D.C.; Sonenshein, A. L. et al., eds. (199?) Bacillus subtilis and Other Gram-Positive Bacteria, ASM Press: Washington, D.C.; Voet, D. and Voet, J. G. (1992) Biochemie, VCH: Weinheim; Brock, T. D. and Madigan, M. T. (1991) Biology of Microorgansisms, 6^{th} ed. Prentice Hall: Englewood Cliffs, p. 267-269; Rhodes, P. M. and Stanbury, P. F. Applied Microbial Physiology—A Practical Approach, Oxford Univ. Press: Oxford.

C. Enzymes and Proteolysis

[0055] The intracellular conditions for which bacteria such as C. glutamicum are optimized are frequently not conditions under which many biochemical reactions would normally take place. In order to make such reactions proceed under physiological conditions, cells utilize enzymes. Enzymes are proteinaceous biological catalysts, spatially orienting reacting molecules or providing a specialized environment such that the energy barrier to a biochemical reaction is lowered. Different enzymes catalyze different reactions, and each enzyme may be the subject of transcriptional, translational, or posttranslational regulation such that the reaction will only take place under appropriate conditions and at specified times. Enzymes may contribute to the degradation (e.g., the proteases), synthesis (e.g., the synthases), or modification (e.g., transferases or isomerases) of compounds, all of which enable the production of necessary compounds within the cell. This, in turn, contributes to the maintenance of cellular homeostasis.

[0056] However, the fact that enzymes are optimized for activity under the physiological conditions at which the bacterium is most viable means that when environmental conditions are perturbed, there is a significant possibility that enzyme activity will also be perturbed. For example, changes in temperature may result in aberrantly folded proteins, and the same is true for changes of pH—protein folding is largely dependent on electrostatic and hydrophobic interactions of amino acids within the polypeptide chain, so any alteration to the charges on individual amino acids (as might be brought about by a change in cellular pH) may have a profound effect on the ability of the protein to correctly fold. Changes in temperature effectively change the amount of kinetic energy that the polypeptide molecule possesses, which affects the ability of the polypeptide to settle into a correctly folded, energetically stable configuration. Misfolded proteins may be harmful to the cell for two reasons. First, the aberrantly folded protein may have a similarly aberrant activity, or no activity whatsoever. Second, misfolded proteins may lack the conformational regions necessary for proper regulation by other cellular systems and thus may continue to be active but in an uncontrolled fashion.

[0057] The cell has a mechanism by which misfolded enzymes and regulatory proteins may be rapidly destroyed before any damage occurs to the cell: proteolysis. Proteins such as those of the la/lon family and those of the Clp family specifically recognize and degrade misfolded proteins (see, e.g., Sherman, M. Y., Goldberg, A. L. (1999) EXS 77: 57-78 and references therein and Porankiewicz J. (1999) Molec. Microbiol. 32(3): 449-58, and references therein; Neidhardt, F. C., et al. (1996) E. coli and Salmonella, ASM Press: Washington, D.C. and references therein; and Pritchard, G. G., and Coolbear, T. (1993) FEMS Microbiol. Rev. 12(1-3): 179-206 and references therein). These enzymes bind to misfolded or unfolded proteins and degrade them in an ATP-dependent manner. Proteolysis thus serves as an important mechanism employed by the cell to prevent damage to normal cellular functions upon environmental changes, and it further permits cells to survive under conditions and in environments which would otherwise be toxic due to misregulated and/or aberrant enzyme or regulatory activity.

[0058] Proteolysis also has important functions in the cell under optimal environmental conditions. Within normal metabolic processes, proteases aid in the hydrolysis of peptide bonds, in the catabolism of complex molecules to provide necessary degradation products, and in protein modification. Secreted proteases play an important role in the catabolism of external nutrients even prior to the entry of these compounds into the cell. Further, proteolytic activity itself may serve regulatory functions; sporulation in B. subtilis and cell cycle progression in Caulobacter spp. are known to be regulated by key proteolytic events in each of these species (Gottesman, S. (1999) Curr. Opin. Microbiol. 2(2): 142-147). Thus, proteolytic processes are key for cellular survival under both suboptimal and optimal environmental conditions, and contribute to the overall maintenance of homeostasis in cells.

D. Cell Wall Production and Rearrangements

[0059] While the biochemical machinery of the cell may be able to readily adapt to different and possibly unfavorable environments, cells still require a general mechanism by which they may be protected from the environment. For many bacteria, the cell wall affords such protection, and also plays roles in adhesion, cell growth and division, and transport of desired solutes and waste materials.

[0060] In order to function, cells require intracellular concentrations of metabolites and other molecules that are substantially higher than those of the surrounding media. Since these metabolites are largely prevented from leaving the cell due to the presence of the hydrophobic membrane, the tendency of the system is for water molecules to enter the cell from the external medium such that the interior concentrations of solutes match the exterior concentrations. Water molecules are readily able to cross the cellular membrane, and this membrane is not able to withstand the resulting swelling and pressure, which may lead to osmotic lysis of the cell. The rigidity of the cell wall greatly improves the ability of the cell to tolerate these pressures, and offers a further barrier to the unwanted diffusion of these metabolites and desired solutes from the cell. Similarly, the cell wall also serves to prevent unwanted material from entering the cell.

[0061] The cell wall also participates in a number of other cellular processes, such as adhesion and cell growth and division. Due to the fact that the cell wall completely surrounds the cell, any interaction of the cell with its surroundings must be mediated by the cell wall. Thus, the cell wall must participate in any adherence of the cell to other cells and to desired surfaces. Further, the cell cannot grow or divide without concomitant changes in the cell wall. Since the protection that the wall affords requires its presence during growth, morphogenesis and multiplication, one of the key steps in cell division is cell wall synthesis within the cell such that a new cell divides from the old. Thus, frequently cell wall biosynthesis is regulated in tandem with cell growth and cell division (see, e.g., Sonenshein, A. L. et al, eds. (1993) Bacillus subtilis and Other Gram-Positive Bacteria, ASM: Washington, D.C.).

[0062] The structure of the cell wall varies between gram-positive and gram-negative bacteria. However, in both types, the fundamental structural unit of the wall remains similar: an overlapping lattice of two polysaccharides, N-acetyl glucosamine (NAG) and N-acetyl muramic acid (NAM) which are cross-linked by amino acids (most commonly L-alanine, D-glutamate, diaminopimelic acid, and D-alanine), termed ‘peptidoglycan’. The processes involved in the synthesis of the cell wall are known (see, e.g., Michal, G., ed. (1999) Biochemical Pathways: An Atlas of Biochemistry and Molecular Biology, Wiley: New York).

[0063] In gram-negative bacteria, the inner cellular membrane is coated by a single-layered peptidoglycan (approximately 10 nm thick), termed the murein-sacculus. This peptidoglycan structure is very rigid, and its structure determines the shape of the organism. The outer surface of the murein-sacculus is covered with an outer membrane, containing porins and other membrane proteins, phospholipids, and lipopolysaccharides. To maintain a tight association with the outer membrane, the gram-negative cell wall also has interspersed lipid molecules which serve to anchor it to the surrounding membrane.

[0064] In gram-positive bacteria, such as Corynebacterium glutamicum, the cytoplasmic membrane is covered by a multi-layered peptidoglycan, which ranges from 20-80 nm in thickness (see, e.g., Lengeler et al. (1999) Biology of Prokaryotes Thieme Verlag: Stuttgart, p. 913-918, p. 875-899, and p. 88-109 and references therein). The gram-positive cell wall also contains teichoic acid, a polymer of glycerol or ribitol linked through phosphate groups. Teichoic acid is also able to associate with amino acids, and forms covalent bonds with muramic acid. Also present in the cell wall may be lipoteichoic acids and teichuronic acids. If present, cellular surface structures such as flagella or capsules will be anchored in this layer as well.

III. Elements and Methods of the Invention

[0065] The present invention is based, at least in part, on the discovery of novel molecules, referred to herein as HA nucleic acid and protein molecules, which participate in the maintenance of homeostasis in C. glutamicum, or which perform a function involved in the adaptation of this microorganism to different environmental conditions. In one embodiment, the HA molecules participate in C. glutamicum cell wall biosynthesis or rearrangements, in the metabolism of inorganic compounds, in the modification or degradation of aromatic or aliphatic compounds, or have an enzymatic or proteolytic activity. In a preferred embodiment, the activity of the HA molecules of the present invention with regard to C. glutamicum cell wall biosynthesis or rearrangements, metabolism of inorganic compounds, modification or degradation of aromatic or aliphatic compounds, or enzymatic or proteolytic activity has an impact on the production of a desired fine chemical by this organism. In a particularly preferred embodiment, the HA molecules of the invention are modulated in activity, such that the C. glutamicum cellular processes in which the HA molecules participate (e.g., C. glutamicum cell wall biosynthesis or rearrangements, metabolism of inorganic compounds, modification or degradation of aromatic or aliphatic compounds, or enzymatic or proteolytic activity) are also altered in activity, resulting either directly or indirectly in a modulation of the yield, production, and/or efficiency of production of a desired fine chemical by C. glutamicum.

[0066] The language, “HA protein” or “HA polypeptide” includes proteins which participate in a number of cellular processes related to C. glutamicum homeostasis or the ability of C. glutamicum cells to adapt to unfavorable environmental conditions. For example, an HA protein may be involved in C. glutamicum cell wall biosynthesis or rearrangements, in the metabolism of inorganic compounds in C. glutamicum, in the modification or degradation of aromatic or aliphatic compounds in C. glutamicum, or have a C. glutamicum enzymatic or proteolytic activity. Examples of HA proteins include those encoded by the HA genes set forth in Table 1 and Appendix A. The terms “HA gene” or “HA nucleic acid sequence” include nucleic acid sequences encoding an HA protein, which consist of a coding region and also corresponding untranslated 5′ and 3′ sequence regions. Examples of HA genes include those set forth in Table 1. The terms “production” or “productivity” are art-recognized and include the concentration of the fermentation product (for example, the desired fine chemical) formed within a given time and a given fermentation volume (e.g., kg product per hour per liter). The term “efficiency of production” includes the time required for a particular level of production to be achieved (for example, how long it takes for the cell to attain a particular rate of output of a fine chemical). The term “yield” or “product/carbon yield” is art-recognized and includes the efficiency of the conversion of the carbon source into the product (i.e., fine chemical). This is generally written as, for example, kg product per kg carbon source. By increasing the yield or production of the compound, the quantity of recovered molecules, or of useful recovered molecules of that compound in a given amount of culture over a given amount of time is increased. The terms “biosynthesis” or a “biosynthetic pathway” are art-recognized and include the synthesis of a compound, preferably an organic compound, by a cell from intermediate compounds in what may be a multistep and highly regulated process. The terms “degradation” or a “degradation pathway” are art-recognized and include the breakdown of a compound, preferably an organic compound, by a cell to degradation products (generally speaking, smaller or less complex molecules) in what may be a multistep and highly regulated process. The language “metabolism” is art-recognized and includes the totality of the biochemical reactions that take place in an organism. The metabolism of a particular compound, then, (e.g., the metabolism of an amino acid such as glycine) comprises the overall biosynthetic, modification, and degradation pathways in the cell related to this compound. The term “homeostasis” is art-recognized and includes all of the mechanisms utilized by a cell to maintain a constant intracellular environment despite the prevailing extracellular environmental conditions. A non-limiting example of such processes is the utilization of a cell wall to prevent osmotic lysis due to high intracellular solute concentrations. The term “adaptation” or “adaptation to an environmental condition” is art-recognized and includes mechanisms utilized by the cell to render the cell able to survive under nonpreferred environmental conditions (generally speaking, those environmental conditions in which one or more favored nutrients are absent, or in which an environmental condition such as temperature, pH, osmolarity, oxygen percentage and the like fall outside of the optimal survival range of the cell). Many cells, including C. glutamicum cells, possess genes encoding proteins which are expressed under such environmental conditions and which permit continued growth in such suboptimal conditions.

[0067] In another embodiment, the HA molecules of the invention are capable of modulating the production of a desired molecule, such as a fine chemical, in a microorganism such as C. glutamicum. There are a number of mechanisms by which the alteration of an HA protein of the invention may directly affect the yield, production, and/or efficiency of production of a fine chemical from a C. glutamicum strain incorporating such an altered protein. For example, by engineering enzymes which modify or degrade aromatic or aliphatic compounds such that these enzymes are increased or decreased in activity or number, it may be possible to modulate the production of one or more fine chemicals which are the modification or degradation products of these compounds. Similarly, enzymes involved in the metabolism of inorganic compounds provide key molecules (e.g. phosphorous, sulfur, and nitrogen molecules) for the biosynthesis of such fine chemicals as amino acids, vitamins, and nucleic acids. By altering the activity or number of these enzymes in C. glutamicum, it may be possible to increase the conversion of these inorganic compounds (or to use alternate inorganic compounds) to thus permit improved rates of incorporation of inorganic atoms into these fine chemicals. Genetic engineering of C. glutamicum enzymes involved in general cellular processes may also directly improve fine chemical production, since many of these enzymes directly modify fine chemicals (e.g., amino acids) or the enzymes which are involved in fine chemical synthesis or secretion. Modulation of the activity or number of cellular proteases may also have a direct effect on fine chemical production, since many proteases may degrade fine chemicals or enzymes involved in fine chemical production or breakdown.

[0068] Further, the aforementioned enzymes which participate in aromatic/aliphatic compound modification or degradation, general biocatalysis, inorganic compound metabolism or proteolysis are each themselves fine chemicals, desirable for their activity in various in vitro industrial applications. By altering the number of copies of the gene for one or more of these enzymes in C. glutamicum it may be possible to increase the number of these proteins produced by the cell, thereby increasing the potential yield or efficiency of production of these proteins from large-scale C. glutamicum or related bacterial cultures.

[0069] The alteration of an HA protein of the invention may also indirectly affect the yield, production, and/or efficiency of production of a fine chemical from a C. glutamicum strain incorporating such an altered protein. For example, by modulating the activity and/or number of those proteins involved in the construction or rearrangement of the cell wall, it may be possible to modify the structure of the cell wall itself such that the cell is able to better withstand the mechanical and other stresses present during large-scale fermentative culture. Also, large-scale growth of C. glutamicum requires significant cell wall production. Modulation of the activity or number of cell wall biosynthetic or degradative enzymes may allow more rapid rates of cell wall biosynthesis, which in turn may permit increased growth rates of this microorganism in culture and thereby increase the number of cells producing the desired fine chemical.

[0070] By modifying the HA enzymes of the invention, one may also indirectly impact the yield, production, or efficiency of production of one or more fine chemicals from C. glutamicum. For example, many of the general enzymes in C. glutamicum may have a significant impact on global cellular processes (e.g., regulatory processes) which in turn have a significant effect on fine chemical metabolism. Similarly, proteases, enzymes which modify or degrade possibly toxic aromatic or aliphatic compounds, and enzymes which promote the metabolism of inorganic compounds all serve to increase the viability of C. glutamicum. The proteases aid in the selective removal of misfolded or misregulated proteins, such as those that might occur under the relatively stressful environmental conditions encountered during large-scale fermentor culture. By altering these proteins, it may be possible to further enhance this activity and to improve the viability of C. glutamicum in culture. The aromatic/aliphatic modification or degradation proteins not only serve to detoxify these waste compounds (which may be encountered as impurities in culture medium or as waste products from cells themselves), but also to permit the cells to utilize alternate carbon sources if the optimal carbon source is limiting in the culture. By increasing their number and/or activity, the survival of C. glutamicum cells in culture may be enhanced. The inorganic metabolism proteins of the invention supply the cell with inorganic molecules required for all protein and nucleotide (among others) synthesis, and thus are critical for the overall viability of the cell. An increase in the number of viable cells producing one or more desired fine chemicals in large-scale culture should result in a concomitant increase in the yield, production, and/or efficiency of production of the fine chemical in the culture.

[0071] The isolated nucleic acid sequences of the invention are contained within the genome of a Corynebacterium glutamicum strain available through the American Type Culture Collection, given designation ATCC 13032. The nucleotide sequence of the isolated C. glutamicum HA DNAs and the predicted amino acid sequences of the C. glutamicum HA proteins are shown in Appendices A and B, respectively. Computational analyses were performed which classified and/or identified these nucleotide sequences as sequences which encode proteins that participate in C. glutamicum cell wall biosynthesis or rearrangements, metabolism of inorganic compounds, modification or degradation of aromatic or aliphatic compounds, or that have a C. glutamicum enzymatic or proteolytic activity.

[0072] The present invention also pertains to proteins which have an amino acid sequence which is substantially homologous to an amino acid sequence of Appendix B. As used herein, a protein which has an amino acid sequence which is substantially homologous to a selected amino acid sequence is least about 50% homologous to the selected amino acid sequence, e.g., the entire selected amino acid sequence. A protein which has an amino acid sequence which is substantially homologous to a selected amino acid sequence can also be least about 50-60%, preferably at least about 60-70%, and more preferably at least about 70-80%, 80-90%, or 90-95%, and most preferably at least about 96%, 97%, 98%, 99% or more homologous to the selected amino acid sequence.

[0073] The HA protein or a biologically active portion or fragment thereof of the invention can participate in the maintenance of homeostasis in C. glutamicum, or can perform a function involved in the adaptation of this microorganism to different environmental conditions, or have one or more of the activities set forth in Table 1.

[0074] Various aspects of the invention are described in further detail in the following subsections.

A. Isolated Nucleic Acid Molecules

[0075] One aspect of the invention pertains to isolated nucleic acid molecules that encode HA polypeptides or biologically active portions thereof, as well as nucleic acid fragments sufficient for use as hybridization probes or primers for the identification or amplification of HA-encoding nucleic acid (e.g., HA DNA). As used herein, the term “nucleic acid molecule” is intended to include DNA molecules (e.g., cDNA or genomic DNA) and RNA molecules (e.g., mRNA) and analogs of the DNA or RNA generated using nucleotide analogs. This term also encompasses untranslated sequence located at both the 3′ and 5′ ends of the coding region of the gene: at least about 100 nucleotides of sequence upstream from the 5′ end of the coding region and at least about 20 nucleotides of sequence downstream from the 3′end of the coding region of the gene. The nucleic acid molecule can be single-stranded or double-stranded, but preferably is double-stranded DNA. An “isolated” nucleic acid molecule is one which is separated from other nucleic acid molecules which are present in the natural source of the nucleic acid. Preferably, an “isolated” nucleic acid is free of sequences which naturally flank the nucleic acid (i.e., sequences located at the 5′ and 3′ ends of the nucleic acid) in the genomic DNA of the organism from which the nucleic acid is derived. For example, in various embodiments, the isolated HA nucleic acid molecule can contain less than about 5 kb, 4 kb, 3 kb, 2 kb, 1 kb, 0.5 kb or 0.1 kb of nucleotide sequences which naturally flank the nucleic acid molecule in genomic DNA of the cell from which the nucleic acid is derived (e.g, a C. glutamicum cell). Moreover, an “isolated” nucleic acid molecule, such as a DNA molecule, can be substantially free of other cellular material, or culture medium when produced by recombinant techniques, or chemical precursors or other chemicals when chemically synthesized.

[0076] A nucleic acid molecule of the present invention, e.g., a nucleic acid molecule having a nucleotide sequence of Appendix A, or a portion thereof, can be isolated using standard molecular biology techniques and the sequence information provided herein. For example, a C. glutamicum HA DNA can be isolated from a C. glutamicum library using all or portion of one of the sequences of Appendix A as a hybridization probe and standard hybridization techniques (e.g., as described in Sambrook, J., Fritsh, E. F., and Maniatis, T. Molecular Cloning: A Laboratory Manual. 2nd, ed, Cold Spring Harbor Laboratory, Cold Spring Harbor Laboratory Press, Cold Spring Harbor, N.Y., 1989). Moreover, a nucleic acid molecule encompassing all or a portion of one of the sequences of Appendix A can be isolated by the polymerase chain reaction using oligonucleotide primers designed based upon this sequence (e.g., a nucleic acid molecule encompassing all or a portion of one of the sequences of Appendix A can be isolated by the polymerase chain reaction using oligonucleotide primers designed based upon this same sequence of Appendix A). For example, mRNA can be isolated from normal endothelial cells (e.g., by the guanidinium-thiocyanate extraction procedure of Chirgwin et al. (1979) Biochemistry 18: 5294-5299) and DNA can be prepared using reverse transcriptase (e.g., Moloney MLV reverse transcriptase, available from Gibco/BRL, Bethesda, Md.; or AMV reverse transcriptase, available from Seikagaku America, Inc., St. Petersburg, Fla.). Synthetic oligonucleotide primers for polymerase chain reaction amplification can be designed based upon one of the nucleotide sequences shown in Appendix A. A nucleic acid of the invention can be amplified using cDNA or, alternatively, genomic DNA, as a template and appropriate oligonucleotide primers according to standard PCR amplification techniques. The nucleic acid so amplified can be cloned into an appropriate vector and characterized by DNA sequence analysis. Furthermore, oligonucleotides corresponding to an HA nucleotide sequence can be prepared by standard synthetic techniques, e.g., using an automated DNA synthesizer.

[0077] In a preferred embodiment, an isolated nucleic acid molecule of the invention comprises one of the nucleotide sequences shown in Appendix A. The sequences of Appendix A correspond to the Corynebacterium glutamicum HA DNAs of the invention. This DNA comprises sequences encoding HA proteins (i.e., the “coding region”, indicated in each sequence in Appendix A), as well as 5′ untranslated sequences and 3′ untranslated sequences, also indicated in Appendix A. Alternatively, the nucleic acid molecule can comprise only the coding region of any of the sequences in Appendix A.

[0078] For the purposes of this application, it will be understood that each of the sequences set forth in Appendix A has an identifying RXA, RXN, RXS, or RXC number having the designation “RXA”, “RXN”, “RXS”, or “RXC” followed by 5 digits (i.e., RXA02702, RXN02707, RXS02560, and RXC00110). Each of these sequences comprises up to three parts: a 5′ upstream region, a coding region, and a downstream region. Each of these three regions is identified by the same RXA, RXN, RXS, or RXC designation to eliminate confusion. The recitation “one of the sequences in Appendix A”, then, refers to any of the sequences in Appendix A, which may be distinguished by their differing RXA, RXN, RXS, or RXC designations. The coding region of each of these sequences is translated into a corresponding amino acid sequence, which is set forth in Appendix B. The sequences of Appendix B are identified by the same RXA, RXN, RXS, or RXC designations as Appendix A, such that they can be readily correlated. For example, the amino acid sequences in Appendix B designated RXA02702, RXN02707, RXS02560, and RXC00110 are translations of the coding regions of the nucleotide sequence of nucleic acid molecules RXA02702, RXN02707, RXS02560, and RXC00110, respectively, in Appendix A. Each of the RXA, RXN, RXS, and RXC nucleotide and amino acid sequences of the invention has also been assigned a SEQ ID NO, as indicated in Table 1.

[0079] Several of the genes of the invention are “F-designated genes”. An F-designated gene includes those genes set forth in Table 1 which have an ‘F’ in front of the RXA, RXN, RXS, or RXC designation. For example, SEQ ID NO:1, designated, as indicated on Table 1, as “F RXA02702”, is an F-designated gene, as are SEQ ID NOs: 9, 11, and 13 (designated on Table 1 as “F RXA02707”, “F RXA02708”, and “F RXA02709”, respectively).

[0080] In one embodiment, the nucleic acid molecules of the present invention are not intended to include those compiled in Table 2. In the case of the dapD gene, a sequence for this gene was published in Wehrmann, A., et al. (1998) J. Bacteriol. 180(12): 3159-3165. However, the sequence obtained by the inventors of the present application is significantly longer than the published version. It is believed that the published version relied on an incorrect start codon, and thus represents only a fragment of the actual coding region.

[0081] In another preferred embodiment, an isolated nucleic acid molecule of the invention comprises a nucleic acid molecule which is a complement of one of the nucleotide sequences shown in Appendix A, or a portion thereof. A nucleic acid molecule which is complementary to one of the nucleotide sequences shown in Appendix A is one which is sufficiently complementary to one of the nucleotide sequences shown in Appendix A such that it can hybridize to one of the nucleotide sequences shown in Appendix A, thereby forming a stable duplex.

[0082] In still another preferred embodiment, an isolated nucleic acid molecule of the invention comprises a nucleotide sequence which is at least about 50%, 51%, 52%, 53%, 54%, 55%, 56%, 57%, 58%, 59%, or 60%, preferably at least about 61%, 62%, 63%, 64%, 65%, 66%, 67%, 68%, 69%, or 70%%, more preferably at least about 71%, 72%, 73%, 74%, 75%, 76%, 77%, 78%, 79%, or 80%, 81%, 82%, 83%, 84%, 85%, 86%, 87%, 88%, 89%, or 90%, or 91%, 92%, 93%, 94%, and even more preferably at least about 95%, 96%, 97%, 98%, 99% or more homologous to a nucleotide sequence shown in Appendix A, or a portion thereof. Ranges and identity values intermediate to the above-recited ranges, (e.g., 70-90% identical or 80-95% identical) are also intended to be encompassed by the present invention. For example, ranges of identity values using a combination of any of the above values recited as upper and/or lower limits are intended to be included. In an additional preferred embodiment, an isolated nucleic acid molecule of the invention comprises a nucleotide sequence which hybridizes, e.g., hybridizes under stringent conditions, to one of the nucleotide sequences shown in Appendix A, or a portion thereof.

[0083] Moreover, the nucleic acid molecule of the invention can comprise only a portion of the coding region of one of the sequences in Appendix A, for example a fragment which can be used as a probe or primer or a fragment encoding a biologically active portion of an HA protein. The nucleotide sequences determined from the cloning of the HA genes from C. glutamicum allows for the generation of probes and primers designed for use in identifying and/or cloning HA homologues in other cell types and organisms, as well as HA homologues from other Corynebacteria or related species. The probe/primer typically comprises substantially purified oligonucleotide. The oligonucleotide typically comprises a region of nucleotide sequence that hybridizes under stringent conditions to at least about 12, preferably about 25, more preferably about 40, 50 or 75 consecutive nucleotides of a sense strand of one of the sequences set forth in Appendix A, an anti-sense sequence of one of the sequences set forth in Appendix A, or naturally occurring mutants thereof. Primers based on a nucleotide sequence of Appendix A can be used in PCR reactions to clone HA homologues. Probes based on the HA nucleotide sequences can be used to detect transcripts or genomic sequences encoding the same or homologous proteins. In preferred embodiments, the probe further comprises a label group attached thereto, e.g. the label group can be a radioisotope, a fluorescent compound, an enzyme, or an enzyme co-factor. Such probes can be used as a part of a diagnostic test kit for identifying cells which misexpress an HA protein, such as by measuring a level of an HA-encoding nucleic acid in a sample of cells, e.g., detecting HA mRNA levels or determining whether a genomic HA gene has been mutated or deleted.

[0084] In one embodiment, the nucleic acid molecule of the invention encodes a protein or portion thereof which includes an amino acid sequence which is sufficiently homologous to an amino acid sequence of Appendix B such that the protein or portion thereof maintains the ability to participate in the maintenance of homeostasis in C. glutamicum, or to perform a function involved in the adaptation of this microorganism to different environmental conditions. As used herein, the language “sufficiently homologous” refers to proteins or portions thereof which have amino acid sequences which include a minimum number of identical or equivalent (e.g., an amino acid residue which has a similar side chain as an amino acid residue in one of the sequences of Appendix B) amino acid residues to an amino acid sequence of Appendix B such that the protein or portion thereof is able to participate in the maintenance of homeostasis in C. glutamicum, or to perform a function involved in the adaptation of this microorganism to different environmental conditions. Proteins involved in C. glutamicum cell wall biosynthesis or rearrangements, metabolism of inorganic compounds, modification or degradation of aromatic or aliphatic compounds, or that have a C. glutamicum enzymatic or proteolytic activity, as described herein, may play a role in the production and secretion of one or more fine chemicals. Examples of such activities are also described herein. Thus, “the function of an HA protein” contributes either directly or indirectly to the yield, production, and/or efficiency of production of one or more fine chemicals. Examples of HA protein activities are set forth in Table 1.

[0085] In another embodiment, the protein is at least about 50-60%, preferably at least about 60-70%, and more preferably at least about 70-80%, 80-90%, 90-95%, and most preferably at least about 96%, 97%, 98%, 99% or more homologous to an entire amino acid sequence of Appendix B.

[0086] Portions of proteins encoded by the HA nucleic acid molecules of the invention are preferably biologically active portions of one of the HA proteins. As used herein, the term “biologically active portion of an HA protein” is intended to include a portion, e.g., a domain/motif, of an HA protein that can participate in the maintenance of homeostasis in C. glutamicum, or that can perform a function involved in the adaptation of this microorganism to different environmental conditions, or has an activity as set forth in Table 1. To determine whether an HA protein or a biologically active portion thereof can participate in C. glutamicum cell wall biosynthesis or rearrangements, metabolism of inorganic compounds, modification or degradation of aromatic or aliphatic compounds, or has a C. glutamicum enzymatic or proteolytic activity, an assay of enzymatic activity may be performed. Such assay methods are well known to those of ordinary skill in the art, as detailed in Example 8 of the Exemplification.

[0087] Additional nucleic acid fragments encoding biologically active portions of an HA protein can be prepared by isolating a portion of one of the sequences in Appendix B, expressing the encoded portion of the HA protein or peptide (e.g., by recombinant expression in vitro) and assessing the activity of the encoded portion of the HA protein or peptide.

[0088] The invention further encompasses nucleic acid molecules that differ from one of the nucleotide sequences shown in Appendix A (and portions thereof) due to degeneracy of the genetic code and thus encode the same HA protein as that encoded by the nucleotide sequences shown in Appendix A. In another embodiment, an isolated nucleic acid molecule of the invention has a nucleotide sequence encoding a protein having an amino acid sequence shown in Appendix B. In a still further embodiment, the nucleic acid molecule of the invention encodes a full length C. glutamicum protein which is substantially homologous to an amino acid sequence of Appendix B (encoded by an open reading frame shown in Appendix A).

[0089] It will be understood by one of ordinary skill in the art that in one embodiment the sequences of the invention are not meant to include the sequences of the prior art, such as those Genbank sequences set forth in Tables 2 or 4 which were available prior to the present invention. In one embodiment, the invention includes nucleotide and amino acid sequences having a percent identity to a nucleotide or amino acid sequence of the invention which is greater than that of a sequence of the prior art (e.g., a Genbank sequence (or the protein encoded by such a sequence) set forth in Tables 2 or 4). For example, the invention includes a nucleotide sequence which is greater than and/or at least 36% identical to the nucleotide sequence designated RXA00009 (SEQ ID NO:85), a nucleotide sequence which is greater than and/or at least 40% identical to the nucleotide sequence designated RXA00277 (SEQ ID NO:91), and a nucleotide sequence which is greater than and/or at least 43% identical to the nucleotide sequence designated RXA00499 (SEQ ID NO:173). One of ordinary skill in the art would be able to calculate the lower threshold of percent identity for any given sequence of the invention by examining the GAP-calculated percent identity scores set forth in Table 4 for each of the three top hits for the given sequence, and by subtracting the highest GAP-calculated percent identity from 100 percent. One of ordinary skill in the art will also appreciate that nucleic acid and amino acid sequences having percent identities greater than the lower threshold so calculated (e.g., at least 50%, 51%, 52%, 53%, 54%, 55%, 56%, 57%, 58%, 59%, or 60%, preferably at least about 61%, 62%, 63%, 64%, 65%, 66%, 67%, 68%, 69%, or 70%, more preferably at least about 71%, 72%, 73%, 74%, 75%, 76%, 77%, 78%, 79%, or 80%, 81%, 82%, 83%, 84%, 85%, 86%, 87%, 88%, 89%, or 90%, or 91%, 92%, 93%, 94%, and even more preferably at least about 95%, 96%, 97%, 98%, 99% or more identical) are also encompassed by the invention.

[0090] In addition to the C. glutamicum HA nucleotide sequences shown in Appendix A, it will be appreciated by those of ordinary skill in the art that DNA sequence polymorphisms that lead to changes in the amino acid sequences of HA proteins may exist within a population (e.g., the C. glutamicum population). Such genetic polymorphism in the HA gene may exist among individuals within a population due to natural variation. As used herein, the terms “gene” and “recombinant gene” refer to nucleic acid molecules comprising an open reading frame encoding an HA protein, preferably a C. glutamicum HA protein. Such natural variations can typically result in 1-5% variance in the nucleotide sequence of the HA gene. Any and all such nucleotide variations and resulting amino acid polymorphisms in HA that are the result of natural variation and that do not alter the functional activity of HA proteins are intended to be within the scope of the invention.

[0091] Nucleic acid molecules corresponding to natural variants and non-C. glutamicum homologues of the C. glutamicum HA DNA of the invention can be isolated based on their homology to the C. glutamicum HA nucleic acid disclosed herein using the C. glutamicum DNA, or a portion thereof, as a hybridization probe according to standard hybridization techniques under stringent hybridization conditions. Accordingly, in another embodiment, an isolated nucleic acid molecule of the invention is at least 15 nucleotides in length and hybridizes under stringent conditions to the nucleic acid molecule comprising a nucleotide sequence of Appendix A. In other embodiments, the nucleic acid is at least 30, 50, 100, 250 or more nucleotides in length. As used herein, the term “hybridizes under stringent conditions” is intended to describe conditions for hybridization and washing under which nucleotide sequences at least 60% homologous to each other typically remain hybridized to each other. Preferably, the conditions are such that sequences at least about 65%, more preferably at least about 70%, and even more preferably at least about 75% or more homologous to each other typically remain hybridized to each other. Such stringent conditions are known to those of ordinary skill in the art and can be found in Current Protocols in Molecular Biology, John Wiley & Sons, N.Y. (1989), 6.3.1-6.3.6. A preferred, non-limiting example of stringent hybridization conditions are hybridization in 6× sodium chloride/sodium citrate (SSC) at about 45° C., followed by one or more washes in 0.2×SSC, 0.1% SDS at 50-65° C. Preferably, an isolated nucleic acid molecule of the invention that hybridizes under stringent conditions to a sequence of Appendix A corresponds to a naturally-occurring nucleic acid molecule. As used herein, a “naturally-occurring” nucleic acid molecule refers to an RNA or DNA molecule having a nucleotide sequence that occurs in nature (e.g., encodes a natural protein). In one embodiment, the nucleic acid encodes a natural C. glutamicum HA protein.

[0092] In addition to naturally-occurring variants of the HA sequence that may exist in the population, one of ordinary skill in the art will further appreciate that changes can be introduced by mutation into a nucleotide sequence of Appendix A, thereby leading to changes in the amino acid sequence of the encoded HA protein, without altering the functional ability of the HA protein. For example, nucleotide substitutions leading to amino acid substitutions at “non-essential” amino acid residues can be made in a sequence of Appendix A. A “non-essential” amino acid residue is a residue that can be altered from the wild-type sequence of one of the HA proteins (Appendix B) without altering the activity of said HA protein, whereas an “essential” amino acid residue is required for HA protein activity. Other amino acid residues, however, (e.g., those that are not conserved or only semi-conserved in the domain having HA activity) may not be essential for activity and thus are likely to be amenable to alteration without altering HA activity.

[0093] Accordingly, another aspect of the invention pertains to nucleic acid molecules encoding HA proteins that contain changes in amino acid residues that are not essential for HA activity. Such HA proteins differ in amino acid sequence from a sequence contained in Appendix B yet retain at least one of the HA activities described herein. In one embodiment, the isolated nucleic acid molecule comprises a nucleotide sequence encoding a protein, wherein the protein comprises an amino acid sequence at least about 50% homologous to an amino acid sequence of Appendix B and is capable of participating in the maintenance of homeostasis in C. glutamicum, or of performing a function involved in the adaptation of this microorganism to different environmental conditions, or has one or more of the activities set forth in Table 1. Preferably, the protein encoded by the nucleic acid molecule is at least about 50-60% homologous to one of the sequences in Appendix B, more preferably at least about 60-70% homologous to one of the sequences in Appendix B, even more preferably at least about 70-80%, 80-90%, 90-95% homologous to one of the sequences in Appendix B, and most preferably at least about 96%, 97%, 98%, or 99% homologous to one of the sequences in Appendix B.

[0094] To determine the percent homology of two amino acid sequences (e.g., one of the sequences of Appendix B and a mutant form thereof) or of two nucleic acids, the sequences are aligned for optimal comparison purposes (e.g., gaps can be introduced in the sequence of one protein or nucleic acid for optimal alignment with the other protein or nucleic acid). The amino acid residues or nucleotides at corresponding amino acid positions or nucleotide positions are then compared. When a position in one sequence (e.g., one of the sequences of Appendix B) is occupied by the same amino acid residue or nucleotide as the corresponding position in the other sequence (e.g., a mutant form of the sequence selected from Appendix B), then the molecules are homologous at that position (i.e., as used herein amino acid or nucleic acid “homology” is equivalent to amino acid or nucleic acid “identity”). The percent homology between the two sequences is a function of the number of identical positions shared by the sequences (i.e., % homology=# of identical positions/total # of positions×100).

[0095] An isolated nucleic acid molecule encoding an HA protein homologous to a protein sequence of Appendix B can be created by introducing one or more nucleotide substitutions, additions or deletions into a nucleotide sequence of Appendix A such that one or more amino acid substitutions, additions or deletions are introduced into the encoded protein. Mutations can be introduced into one of the sequences of Appendix A by standard techniques, such as site-directed mutagenesis and PCR-mediated mutagenesis. Preferably, conservative amino acid substitutions are made at one or more predicted non-essential amino acid residues. A “conservative amino acid substitution” is one in which the amino acid residue is replaced with an amino acid residue having a similar side chain. Families of amino acid residues having similar side chains have been defined in the art. These families include amino acids with basic side chains (e.g., lysine, arginine, histidine), acidic side chains (e.g., aspartic acid, glutamic acid), uncharged polar side chains (e.g., glycine, asparagine, glutamine, serine, threonine, tyrosine, cysteine), nonpolar side chains (e.g., alanine, valine, leucine, isoleucine, proline, phenylalanine, methionine, tryptophan), beta-branched side chains (e.g., threonine, valine, isoleucine) and aromatic side chains (e.g., tyrosine, phenylalanine, tryptophan, histidine). Thus, a predicted nonessential amino acid residue in an HA protein is preferably replaced with another amino acid residue from the same side chain family. Alternatively, in another embodiment, mutations can be introduced randomly along all or part of an HA coding sequence, such as by saturation mutagenesis, and the resultant mutants can be screened for an HA activity described herein to identify mutants that retain HA activity. Following mutagenesis of one of the sequences of Appendix A, the encoded protein can be expressed recombinantly and the activity of the protein can be determined using, for example, assays described herein (see Example 8 of the Exemplification).

[0096] In addition to the nucleic acid molecules encoding HA proteins described above, another aspect of the invention pertains to isolated nucleic acid molecules which are antisense thereto. An “antisense” nucleic acid comprises a nucleotide sequence which is complementary to a “sense” nucleic acid encoding a protein, e.g., complementary to the coding strand of a double-stranded DNA molecule or complementary to an mRNA sequence. Accordingly, an antisense nucleic acid can hydrogen bond to a sense nucleic acid. The antisense nucleic acid can be complementary to an entire HA coding strand, or to only a portion thereof. In one embodiment, an antisense nucleic acid molecule is antisense to a “coding region” of the coding strand of a nucleotide sequence encoding an HA protein. The term “coding region” refers to the region of the nucleotide sequence comprising codons which are translated into amino acid residues (e.g., the entire coding region of SEQ ID NO. 1 (RXA02702) comprises nucleotides 1 to 1458). In another embodiment, the antisense nucleic acid molecule is antisense to a “noncoding region” of the coding strand of a nucleotide sequence encoding HA. The term “noncoding region” refers to 5′ and 3′ sequences which flank the coding region that are not translated into amino acids (i.e., also referred to as 5′ and 3′ untranslated regions).

[0097] Given the coding strand sequences encoding HA disclosed herein (e.g., the sequences set forth in Appendix A), antisense nucleic acids of the invention can be designed according to the rules of Watson and Crick base pairing. The antisense nucleic acid molecule can be complementary to the entire coding region of HA mRNA, but more preferably is an oligonucleotide which is antisense to only a portion of the coding or noncoding region of HA mRNA. For example, the antisense oligonucleotide can be complementary to the region surrounding the translation start site of HA mRNA. An antisense oligonucleotide can be, for example, about 5, 10, 15, 20, 25, 30, 35, 40, 45 or 50 nucleotides in length. An antisense nucleic acid of the invention can be constructed using chemical synthesis and enzymatic ligation reactions using procedures known in the art. For example, an antisense nucleic acid (e.g., an antisense oligonucleotide) can be chemically synthesized using naturally occurring nucleotides or variously modified nucleotides designed to increase the biological stability of the molecules or to increase the physical stability of the duplex formed between the antisense and sense nucleic acids, e.g., phosphorothioate derivatives and acridine substituted nucleotides can be used. Examples of modified nucleotides which can be used to generate the antisense nucleic acid include 5-fluorouracil, 5-bromouracil, 5-chlorouracil, 5-iodouracil, hypoxanthine, xanthine, 4-acetylcytosine, 5-(carboxyhydroxylmethyl) uracil, 5-carboxymethylaminomethyl-2-thiouridine, 5-carboxymethylaminomethyluracil, dihydrouracil, beta-D-galactosylqueosine, inosine, N6-isopentenyladenine, 1-methylguanine, 1-methylinosine, 2,2-dimethylguanine, 2-methyladenine, 2-methylguanine, 3-methylcytosine, 5-methylcytosine, N6-adenine, 7-methylguanine, 5-methylaminomethyluracil, 5-methoxyaminomethyl-2-thiouracil, beta-D-mannosylqueosine, 5′-methoxycarboxymethyluracil, 5-methoxyuracil, 2-methylthio-N-6-isopentenyladenine, uracil-5-oxyacetic acid (v), wybutoxosine, pseudouracil, queosine, 2-thiocytosine, 5-methyl-2-thiouracil, 2-thiouracil, 4-thiouracil, 5-methyluracil, uracil-5-oxyacetic acid methylester, uracil-5-oxyacetic acid (v), 5-methyl-2-thiouracil, 3-(3-amino-3-N-2-carboxypropyl) uracil, (acp3)w, and 2,6-diaminopurine. Alternatively, the antisense nucleic acid can be produced biologically using an expression vector into which a nucleic acid has been subcloned in an antisense orientation (i.e., RNA transcribed from the inserted nucleic acid will be of an antisense orientation to a target nucleic acid of interest, described further in the following subsection).

[0098] The antisense nucleic acid molecules of the invention are typically administered to a cell or generated in situ such that they hybridize with or bind to cellular mRNA and/or genomic DNA encoding an HA protein to thereby inhibit expression of the protein, e.g., by inhibiting transcription and/or translation. The hybridization can be by conventional nucleotide complementarity to form a stable duplex, or, for example, in the case of an antisense nucleic acid molecule which binds to DNA duplexes, through specific interactions in the major groove of the double helix. The antisense molecule can be modified such that it specifically binds to a receptor or an antigen expressed on a selected cell surface, e.g., by linking the antisense nucleic acid molecule to a peptide or an antibody which binds to a cell surface receptor or antigen. The antisense nucleic acid molecule can also be delivered to cells using the vectors described herein. To achieve sufficient intracellular concentrations of the antisense molecules, vector constructs in which the antisense nucleic acid molecule is placed under the control of a strong prokaryotic, viral, or eukaryotic promoter are preferred.

[0099] In yet another embodiment, the antisense nucleic acid molecule of the invention is an α-anomeric nucleic acid molecule. An α-anomeric nucleic acid molecule forms specific double-stranded hybrids with complementary RNA in which, contrary to the usual β-units, the strands run parallel to each other (Gaultier et al. (1987) Nucleic Acids. Res. 15: 6625-6641). The antisense nucleic acid molecule can also comprise a 2′-o-methylribonucleotide (Inoue et al. (1987) Nucleic Acids Res. 15: 6131-6148) or a chimeric RNA-DNA analogue (Inoue et al. (1987) FEBS Lett. 215: 327-330).

[0100] In still another embodiment, an antisense nucleic acid of the invention is a ribozyme. Ribozymes are catalytic RNA molecules with ribonuclease activity which are capable of cleaving a single-stranded nucleic acid, such as an mRNA, to which they have a complementary region. Thus, ribozymes (e.g., hammerhead ribozymes (described in Haselhoff and Gerlach (1988) Nature 334: 585-591)) can be used to catalytically cleave HA mRNA transcripts to thereby inhibit translation of HA mRNA. A ribozyme having specificity for an HA-encoding nucleic acid can be designed based upon the nucleotide sequence of an HA DNA molecule disclosed herein (i.e., SEQ ID NO. 3 (RXA02705) Appendix A). For example, a derivative of a Tetrahymena L-19 IVS RNA can be constructed in which the nucleotide sequence of the active site is complementary to the nucleotide sequence to be cleaved in an HA-encoding mRNA. See, e.g., Cech et al. U.S. Pat. No. 4,987,071 and Cech et al. U.S. Pat. No. 5,116,742. Alternatively, HA mRNA can be used to select a catalytic RNA having a specific ribonuclease activity from a pool of RNA molecules. See, e.g., Bartel, D. and Szostak, J. W. (1993) Science 261: 1411-1418.

[0101] Alternatively, HA gene expression can be inhibited by targeting nucleotide sequences complementary to the regulatory region of an HA nucleotide sequence (e.g., an HA promoter and/or enhancers) to form triple helical structures that prevent transcription of an HA gene in target cells. See generally, Helene, C. (1991) Anticancer Drug Des. 6(6): 569-84; Helene, C. et al. (1992) Ann. N.Y. Acad. Sci. 660: 27-36; and Maher, L. J. (1992) Bioassays 14(12): 807-15.

B. Recombinant Expression Vectors and Host Cells

[0102] Another aspect of the invention pertains to vectors, preferably expression vectors, containing a nucleic acid encoding an HA protein (or a portion thereof). As used herein, the term “vector” refers to a nucleic acid molecule capable of transporting another nucleic acid to which it has been linked. One type of vector is a “plasmid”, which refers to a circular double stranded DNA loop into which additional DNA segments can be ligated. Another type of vector is a viral vector, wherein additional DNA segments can be ligated into the viral genome. Certain vectors are capable of autonomous replication in a host cell into which they are introduced (e.g., bacterial vectors having a bacterial origin of replication and episomal mammalian vectors). Other vectors (e.g., non-episomal mammalian vectors) are integrated into the genome of a host cell upon introduction into the host cell, and thereby are replicated along with the host genome. Moreover, certain vectors are capable of directing the expression of genes to which they are operatively linked. Such vectors are referred to herein as “expression vectors”. In general, expression vectors of utility in recombinant DNA techniques are often in the form of plasmids. In the present specification, “plasmid” and “vector” can be used interchangeably as the plasmid is the most commonly used form of vector. However, the invention is intended to include such other forms of expression vectors, such as viral vectors (e.g., replication defective retroviruses, adenoviruses and adeno-associated viruses), which serve equivalent functions.

[0103] The recombinant expression vectors of the invention comprise a nucleic acid of the invention in a form suitable for expression of the nucleic acid in a host cell, which means that the recombinant expression vectors include one or more regulatory sequences, selected on the basis of the host cells to be used for expression, which are operatively linked to the nucleic acid sequence to be expressed. Within a recombinant expression vector, “operably linked” is intended to mean that the nucleotide sequence of interest is linked to the regulatory sequence(s) in a manner which allows for expression of the nucleotide sequence (e.g., in an in vitro transcription/translation system or in a host cell when the vector is introduced into the host cell). The term “regulatory sequence” is intended to include promoters, enhancers and other expression control elements (e.g., polyadenylation signals). Such regulatory sequences are described, for example, in Goeddel; Gene Expression Technology: Methods in Enzymology 185, Academic Press, San Diego, Calif. (1990). Regulatory sequences include those which direct constitutive expression of a nucleotide sequence in many types of host cell and those which direct expression of the nucleotide sequence only in certain host cells. Preferred regulatory sequences are, for example, promoters such as cos-, tac-, trp-, tet-, trp-tet-, lpp-, lac-, lpp-lac-, lacI^{q}-, T7-, T5-, T3-, gal-, trc-, ara-, SP6-, arny, SPO2, λ-P_{R}- or λ P_{L}, which are used preferably in bacteria. Additional regulatory sequences are, for example, promoters from yeasts and fungi, such as ADC1, MFα, AC, P-60, CYC1, GAPDH, TEF, rp28, ADH, promoters from plants such as CaMV/35S, SSU, OCS, lib4, usp, STLS1, B33, nos or ubiquitin- or phaseolin-promoters. It is also possible to use artificial promoters. It will be appreciated by those of ordinary skill in the art that the design of the expression vector can depend on such factors as the choice of the host cell to be transformed, the level of expression of protein desired, etc. The expression vectors of the invention can be introduced into host cells to thereby produce proteins or peptides, including fusion proteins or peptides, encoded by nucleic acids as described herein (e.g., HA proteins, mutant forms of HA proteins, fusion proteins, etc.).

[0104] The recombinant expression vectors of the invention can be designed for expression of HA proteins in prokaryotic or eukaryotic cells. For example, HA genes can be expressed in bacterial cells such as C. glutamicum, insect cells (using baculovirus expression vectors), yeast and other fungal cells (see Romanos, M. A. et al. (1992) “Foreign gene expression in yeast: a review”, Yeast 8: 423-488; van den Hondel, C. A. M. J. J. et al. (1991) “Heterologous gene expression in filamentous fungi” in: More Gene Manipulations in Fungi, J. W. Bennet & L. L. Lasure, eds., p. 396-428: Academic Press: San Diego; and van den Hondel, C. A. M. J. J. & Punt, P. J. (1991) “Gene transfer systems and vector development for filamentous fungi, in: Applied Molecular Genetics of Fungi, Peberdy, J. F. et al., eds., p. 1-28, Cambridge University Press: Cambridge), algae and multicellular plant cells (see Schmidt, R. and Willmitzer, L. (1988) High efficiency Agrobacterium tumefaciens—mediated transformation of Arabidopsis thaliana leaf and cotyledon explants” Plant Cell Rep.: 583-586), or mammalian cells. Suitable host cells are discussed further in Goeddel, Gene Expression Technology: Methods in Enzymology 185, Academic Press, San Diego, Calif. (1990). Alternatively, the recombinant expression vector can be transcribed and translated in vitro, for example using T7 promoter regulatory sequences and T7 polymerase.

[0105] Expression of proteins in prokaryotes is most often carried out with vectors containing constitutive or inducible promoters directing the expression of either fusion or non-fusion proteins. Fusion vectors add a number of amino acids to a protein encoded therein, usually to the amino terminus of the recombinant protein but also to the C-terminus or fused within suitable regions in the proteins. Such fusion vectors typically serve three purposes: 1) to increase expression of recombinant protein; 2) to increase the solubility of the recombinant protein; and 3) to aid in the purification of the recombinant protein by acting as a ligand in affinity purification. Often, in fusion expression vectors, a proteolytic cleavage site is introduced at the junction of the fusion moiety and the recombinant protein to enable separation of the recombinant protein from the fusion moiety subsequent to purification of the fusion protein. Such enzymes, and their cognate recognition sequences, include Factor Xa, thrombin and enterokinase.

[0106] Typical fusion expression vectors include pGEX (Pharmacia Biotech Inc; Smith, D. B. and Johnson, K. S. (1988) Gene 67: 31-40), pMAL (New England Biolabs, Beverly, Mass.) and pRIT5 (Pharmacia, Piscataway, N.J.) which fuse glutathione S-transferase (GST), maltose E binding protein, or protein A, respectively, to the target recombinant protein. In one embodiment, the coding sequence of the HA protein is cloned into a pGEX expression vector to create a vector encoding a fusion protein comprising, from the N-terminus to the C-terminus, GST-thrombin cleavage site-X protein. The fusion protein can be purified by affinity chromatography using glutathione-agarose resin. Recombinant HA protein unfused to GST can be recovered by cleavage of the fusion protein with thrombin.

[0107] Examples of suitable inducible non-fusion E. coli expression vectors include pTrc (Amann et al., (1988) Gene 69: 301-315) pLG338, pACYC184, pBR322, pUC18, pUC19, pKC30, pRep4, pHS1, pHS2, pPLc236, pMBL24, pLG200, pUR290, pIN-III113-B1, λgt11, pBdC1, and pET 11d (Studier et al., Gene Expression Technology: Methods in Enzymology 185, Academic Press, San Diego, Calif. (1990) 60-89; and Pouwels et al., eds. (1985) Cloning Vectors. Elsevier: New York IBSN 0 444 904018). Target gene expression from the pTrc vector relies on host RNA polymerase transcription from a hybrid trp-lac fusion promoter. Target gene expression from the pET 11d vector relies on transcription from a T7 gn10-lac fusion promoter mediated by a coexpressed viral RNA polymerase (T7 gn1). This viral polymerase is supplied by host strains BL21 (DE3) or HMS174(DE3) from a resident % prophage harboring a T7 gn1 gene under the transcriptional control of the lacUV 5 promoter. For transformation of other varieties of bacteria, appropriate vectors may be selected. For example, the plasmids pIJ101, pIJ364, pIJ702 and pIJ361 are known to be useful in transforming Streptomyces, while plasmids pUB110, pC194, or pBD214 are suited for transformation of Bacillus species. Several plasmids of use in the transfer of genetic information into Corynebacterium include pHM1519, pBL1, pSA77, or pAJ667 (Pouwels et al., eds. (1985) Cloning Vectors. Elsevier: New York IBSN 0 444 904018).

[0108] One strategy to maximize recombinant protein expression is to express the protein in a host bacteria with an impaired capacity to proteolytically cleave the recombinant protein (Gottesman, S., Gene Expression Technology: Methods in Enzymology 185, Academic Press, San Diego, Calif. (1990) 119-128). Another strategy is to alter the nucleic acid sequence of the nucleic acid to be inserted into an expression vector so that the individual codons for each amino acid are those preferentially utilized in the bacterium chosen for expression, such as C. glutamicum (Wada et al. (1992) Nucleic Acids Res. 20: 2111-2118). Such alteration of nucleic acid sequences of the invention can be carried out by standard DNA synthesis techniques.

[0109] In another embodiment, the HA protein expression vector is a yeast expression vector. Examples of vectors for expression in yeast S. cerevisiae include pYepSec1 (Baldari, et al., (1987) Embo J. 6: 229-234), 2μ, pAG-1, Yep6, Yep13, pEMBLYe23, pMFa (Kurjan and Herskowitz, (1982) Cell 30: 933-943), pJRY88 (Schultz et al., (1987) Gene 54: 113-123), and pYES2 (Invitrogen Corporation, San Diego, Calif.). Vectors and methods for the construction of vectors appropriate for use in other fungi, such as the filamentous fungi, include those detailed in: van den Hondel, C. A. M. J. J. & Punt, P. J. (1991) “Gene transfer systems and vector development for filamentous fungi, in: Applied Molecular Genetics of Fungi, J. F. Peberdy, et al., eds., p. 1-28, Cambridge University Press: Cambridge, and Pouwels et al., eds. (1985) Cloning Vectors. Elsevier: New York (IBSN 0 444 904018).

[0110] Alternatively, the HA proteins of the invention can be expressed in insect cells using baculovirus expression vectors. Baculovirus vectors available for expression of proteins in cultured insect cells (e.g., Sf 9 cells) include the pAc series (Smith et al. (1983) Mol. Cell Biol. 3: 2156-2165) and the pVL series (Lucklow and Summers (1989) Virology 170: 31-39).

[0111] In another embodiment, the HA proteins of the invention may be expressed in unicellular plant cells (such as algae) or in plant cells from higher plants (e.g., the spermatophytes, such as crop plants). Examples of plant expression vectors include those detailed in: Becker, D., Kemper, E., Schell, J. and Masterson, R. (1992) “New plant binary vectors with selectable markers located proximal to the left border”, Plant Mol. Biol. 20: 1195-1197; and Bevan, M. W. (1984) “Binary Agrobacterium vectors for plant transformation”, Nucl. Acid. Res. 12: 8711-8721, and include pLGV23, pGHlac+, pBIN19, pAK2004, and pDH51 (Pouwels et al., eds. (1985) Cloning Vectors. Elsevier: New York IBSN 0 444 904018).

[0112] In yet another embodiment, a nucleic acid of the invention is expressed in mammalian cells using a mammalian expression vector. Examples of mammalian expression vectors include pCDM8 (Seed, B. (1987) Nature 329: 840) and pMT2PC (Kaufman et al. (1987) EMBO J. 6: 187-195). When used in mammalian cells, the expression vector's control functions are often provided by viral regulatory elements. For example, commonly used promoters are derived from polyoma, Adenovirus 2, cytomegalovirus and Simian Virus 40. For other suitable expression systems for both prokaryotic and eukaryotic cells see chapters 16 and 17 of Sambrook, J., Fritsh, E. F., and Maniatis, T. Molecular Cloning: A Laboratory Manual. 2nd, ed, Cold Spring Harbor Laboratory, Cold Spring Harbor Laboratory Press, Cold Spring Harbor, N.Y., 1989.

[0113] In another embodiment, the recombinant mammalian expression vector is capable of directing expression of the nucleic acid preferentially in a particular cell type (e.g., tissue-specific regulatory elements are used to express the nucleic acid). Tissue-specific regulatory elements are known in the art. Non-limiting examples of suitable tissue-specific promoters include the albumin promoter (liver-specific; Pinkert et al. (1987) Genes Dev. 1: 268-277), lymphoid-specific promoters (Calame and Eaton (1988) Adv. Immunol. 43: 235-275), in particular promoters of T cell receptors (Winoto and Baltimore (1989) EMBO J. 8: 729-733) and immunoglobulins (Banerji et al. (1983) Cell 33: 729-740; Queen and Baltimore (1983) Cell 33: 741-748), neuron-specific promoters (e.g., the neurofilament promoter; Byrne and Ruddle (1989) PNAS 86: 5473-5477), pancreas-specific promoters (Edlund et al. (1985) Science 230: 912-916), and mammary gland-specific promoters (e.g., milk whey promoter; U.S. Pat. No. 4,873,316 and European Application Publication No. 264,166). Developmentally-regulated promoters are also encompassed, for example the murine hox promoters (Kessel and Gruss (1990) Science 249: 374-379) and the α-fetoprotein promoter (Campes and Tilghman (1989) Genes Dev. 3: 537-546).

[0114] The invention further provides a recombinant expression vector comprising a DNA molecule of the invention cloned into the expression vector in an antisense orientation. That is, the DNA molecule is operatively linked to a regulatory sequence in a manner which allows for expression (by transcription of the DNA molecule) of an RNA molecule which is antisense to HA mRNA. Regulatory sequences operatively linked to a nucleic acid cloned in the antisense orientation can be chosen which direct the continuous expression of the antisense RNA molecule in a variety of cell types, for instance viral promoters and/or enhancers, or regulatory sequences can be chosen which direct constitutive, tissue specific or cell type specific expression of antisense RNA. The antisense expression vector can be in the form of a recombinant plasmid, phagemid or attenuated virus in which antisense nucleic acids are produced under the control of a high efficiency regulatory region, the activity of which can be determined by the cell type into which the vector is introduced. For a discussion of the regulation of gene expression using antisense genes see Weintraub, H. et al., Antisense RNA as a molecular tool for genetic analysis, Reviews—Trends in Genetics, Vol. 1(1) (1986).

[0115] Another aspect of the invention pertains to host cells into which a recombinant expression vector of the invention has been introduced. The terms “host cell” and “recombinant host cell” are used interchangeably herein. It is understood that such terms refer not only to the particular subject cell but to the progeny or potential progeny of such a cell. Because certain modifications may occur in succeeding generations due to either mutation or environmental influences, such progeny may not, in fact, be identical to the parent cell, but are still included within the scope of the term as used herein.

[0116] A host cell can be any prokaryotic or eukaryotic cell. For example, an HA protein can be expressed in bacterial cells such as C. glutamicum, insect cells, yeast or mammalian cells (such as Chinese hamster ovary cells (CHO) or COS cells). Other suitable host cells are known to those of ordinary skill in the art. Microorganisms related to Corynebacterium glutamicum which may be conveniently used as host cells for the nucleic acid and protein molecules of the invention are set forth in Table 3.

[0117] Vector DNA can be introduced into prokaryotic or eukaryotic cells via conventional transformation or transfection techniques. As used herein, the terms “transformation” and “transfection”, “conjugation” and “transduction” are intended to refer to a variety of art-recognized techniques for introducing foreign nucleic acid (e.g., linear DNA or RNA (e.g., a linearized vector or a gene construct alone without a vector) or nucleic acid in the form of a vector (e.g., a plasmid, phage, phasmid, phagemid, transposon or other DNA) into a host cell, including calcium phosphate or calcium chloride co-precipitation, DEAE-dextran-mediated transfection, lipofection, natural competence, chemical-mediated transfer, or electroporation. Suitable methods for transforming or transfecting host cells can be found in Sambrook, et al. (Molecular Cloning: A Laboratory Manual. 2nd, ed., Cold Spring Harbor Laboratory, Cold Spring Harbor Laboratory Press, Cold Spring Harbor, N.Y., 1989), and other laboratory manuals.

[0118] For stable transfection of mammalian cells, it is known that, depending upon the expression vector and transfection technique used, only a small fraction of cells may integrate the foreign DNA into their genome. In order to identify and select these integrants, a gene that encodes a selectable marker (e.g., resistance to antibiotics) is generally introduced into the host cells along with the gene of interest. Preferred selectable markers include those which confer resistance to drugs, such as G418, hygromycin and methotrexate. Nucleic acid encoding a selectable marker can be introduced into a host cell on the same vector as that encoding an HA protein or can be introduced on a separate vector. Cells stably transfected with the introduced nucleic acid can be identified by, for example, drug selection (e.g., cells that have incorporated the selectable marker gene will survive, while the other cells die).

[0119] To create a homologous recombinant microorganism, a vector is prepared which contains at least a portion of an HA gene into which a deletion, addition or substitution has been introduced to thereby alter, e.g., functionally disrupt, the HA gene. Preferably, this HA gene is a Corynebacterium glutamicum HA gene, but it can be a homologue from a related bacterium or even from a mammalian, yeast, or insect source. In a preferred embodiment, the vector is designed such that, upon homologous recombination, the endogenous HA gene is functionally disrupted (i.e., no longer encodes a functional protein; also referred to as a “knock out” vector). Alternatively, the vector can be designed such that, upon homologous recombination, the endogenous HA gene is mutated or otherwise altered but still encodes functional protein (e.g., the upstream regulatory region can be altered to thereby alter the expression of the endogenous HA protein). In the homologous recombination vector, the altered portion of the HA gene is flanked at its 5′ and 3′ ends by additional nucleic acid of the HA gene to allow for homologous recombination to occur between the exogenous HA gene carried by the vector and an endogenous HA gene in a microorganism. The additional flanking HA nucleic acid is of sufficient length for successful homologous recombination with the endogenous gene. Typically, several kilobases of flanking DNA (both at the 5′ and 3′ ends) are included in the vector (see e.g., Thomas, K. R., and Capecchi, M. R. (1987) Cell 51: 503 for a description of homologous recombination vectors). The vector is introduced into a microorganism (e.g., by electroporation) and cells in which the introduced HA gene has homologously recombined with the endogenous HA gene are selected, using art-known techniques.

[0120] In another embodiment, recombinant microorganisms can be produced which contain selected systems which allow for regulated expression of the introduced gene. For example, inclusion of an HA gene on a vector placing it under control of the lac operon permits expression of the HA gene only in the presence of IPTG. Such regulatory systems are well known in the art.

[0121] In another embodiment, an endogenous HA gene in a host cell is disrupted (e.g., by homologous recombination or other genetic means known in the art) such that expression of its protein product does not occur. In another embodiment, an endogenous or introduced HA gene in a host cell has been altered by one or more point mutations, deletions, or inversions, but still encodes a functional HA protein. In still another embodiment, one or more of the regulatory regions (e.g., a promoter, repressor, or inducer) of an HA gene in a microorganism has been altered (e.g., by deletion, truncation, inversion, or point mutation) such that the expression of the HA gene is modulated. One of ordinary skill in the art will appreciate that host cells containing more than one of the described HA gene and protein modifications may be readily produced using the methods of the invention, and are meant to be included in the present invention.

[0122] A host cell of the invention, such as a prokaryotic or eukaryotic host cell in culture, can be used to produce (i.e., express) an HA protein. Accordingly, the invention further provides methods for producing HA proteins using the host cells of the invention. In one embodiment, the method comprises culturing the host cell of invention (into which a recombinant expression vector encoding an HA protein has been introduced, or into which genome has been introduced a gene encoding a wild-type or altered HA protein) in a suitable medium until HA protein is produced. In another embodiment, the method further comprises isolating HA proteins from the medium or the host cell.

C. Isolated HA Proteins

[0123] Another aspect of the invention pertains to isolated HA proteins, and biologically active portions thereof. An “isolated” or “purified” protein or biologically active portion thereof is substantially free of cellular material when produced by recombinant DNA techniques, or chemical precursors or other chemicals when chemically synthesized. The language “substantially free of cellular material” includes preparations of HA protein in which the protein is separated from cellular components of the cells in which it is naturally or recombinantly produced. In one embodiment, the language “substantially free of cellular material” includes preparations of HA protein having less than about 30% (by dry weight) of non-HA protein (also referred to herein as a “contaminating protein”), more preferably less than about 20% of non-HA protein, still more preferably less than about 10% of non-HA protein, and most preferably less than about 5% non-HA protein. When the HA protein or biologically active portion thereof is recombinantly produced, it is also preferably substantially free of culture medium, i.e., culture medium represents less than about 20%, more preferably less than about 10%, and most preferably less than about 5% of the volume of the protein preparation. The language “substantially free of chemical precursors or other chemicals” includes preparations of HA protein in which the protein is separated from chemical precursors or other chemicals which are involved in the synthesis of the protein. In one embodiment, the language “substantially free of chemical precursors or other chemicals” includes preparations of HA protein having less than about 30% (by dry weight) of chemical precursors or non-HA chemicals, more preferably less than about 20% chemical precursors or non-HA chemicals, still more preferably less than about 10% chemical precursors or non-HA chemicals, and most preferably less than about 5% chemical precursors or non-HA chemicals. In preferred embodiments, isolated proteins or biologically active portions thereof lack contaminating proteins from the same organism from which the HA protein is derived. Typically, such proteins are produced by recombinant expression of, for example, a C. glutamicum HA protein in a microorganism such as C. glutamicum.

[0124] An isolated HA protein or a portion thereof of the invention can participate in the repair or recombination of DNA, in the transposition of genetic material, in gene expression (i.e., the processes of transcription or translation), in protein folding, or in protein secretion in Corynebacterium glutamicum, or has one or more of the activities set forth in Table 1. In preferred embodiments, the protein or portion thereof comprises an amino acid sequence which is sufficiently homologous to an amino acid sequence of Appendix B such that the protein or portion thereof maintains the ability to participate in the maintenance of homeostasis in C. glutamicum, or to perform a function involved in the adaptation of this microorganism to different environmental conditions. The portion of the protein is preferably a biologically active portion as described herein. In another preferred embodiment, an HA protein of the invention has an amino acid sequence shown in Appendix B. In yet another preferred embodiment, the HA protein has an amino acid sequence which is encoded by a nucleotide sequence which hybridizes, e.g., hybridizes under stringent conditions, to a nucleotide sequence of Appendix A. In still another preferred embodiment, the HA protein has an amino acid sequence which is encoded by a nucleotide sequence that is at least about 50%, 51%, 52%, 53%, 54%, 55%, 56%, 57%, 58%, 59%, or 60%, preferably at least about 61%, 62%, 63%, 64%, 65%, 66%, 67%, 68%, 69%, or 70%, more preferably at least about 71%, 72%, 73%, 74%, 75%, 76%, 77%, 78%, 79%, or 80%, 81%, 82%, 83%, 84%, 85%, 86%, 87%, 88%, 89%, or 90%, or 91%, 92%, 93%, 94%, and even more preferably at least about 95%, 96%, 97%, 98%, 99% % or more homologous to one of the nucleic acid sequences of Appendix A, or a portion thereof. Ranges and identity values intermediate to the above-recited values, (e.g., 70-90% identical or 80-95% identical) are also intended to be encompassed by the present invention. For example, ranges of identity values using a combination of any of the above values recited as upper and/or lower limits are intended to be included. The preferred HA proteins of the present invention also preferably possess at least one of the HA activities described herein. For example, a preferred HA protein of the present invention includes an amino acid sequence encoded by a nucleotide sequence which hybridizes, e.g., hybridizes under stringent conditions, to a nucleotide sequence of Appendix A, and which can participate in the maintenance of homeostasis in C. glutamicum, or can perform a function involved in the adaptation of this microorganism to different environmental conditions, or which has one or more of the activities set forth in Table 1.

[0125] In other embodiments, the HA protein is substantially homologous to an amino acid sequence of Appendix B and retains the functional activity of the protein of one of the sequences of Appendix B yet differs in amino acid sequence due to natural variation or mutagenesis, as described in detail in subsection I above. Accordingly, in another embodiment, the HA protein is a protein which comprises an amino acid sequence which is at least about 50%, 51%, 52%, 53%, 54%, 55%, 56%, 57%, 58%, 59%, or 60%, preferably at least about 61%, 62%, 63%, 64%, 65%, 66%, 67%, 68%, 69%, or 70%, more preferably at least about 71%, 72%, 73%, 74%, 75%, 76%, 77%, 78%, 79%, or 80%, 81%, 82%, 83%, 84%, 85%, 86%, 87%, 88%, 89%, or 90%, or 91%, 92%, 93%, 94%, and even more preferably at least about 95%, 96%, 97%, 98%, 99% or more homologous to an entire amino acid sequence of Appendix B and which has at least one of the HA activities described herein. Ranges and identity values intermediate to the above-recited values, (e.g., 70-90% identical or 80-95% identical) are also intended to be encompassed by the present invention. For example, ranges of identity values using a combination of any of the above values recited as upper and/or lower limits are intended to be included. In another embodiment, the invention pertains to a full length C. glutamicum protein which is substantially homologous to an entire amino acid sequence of Appendix B.

[0126] Biologically active portions of an HA protein include peptides comprising amino acid sequences derived from the amino acid sequence of an HA protein, e.g., the an amino acid sequence shown in Appendix B or the amino acid sequence of a protein homologous to an HA protein, which include fewer amino acids than a full length HA protein or the full length protein which is homologous to an HA protein, and exhibit at least one activity of an HA protein. Typically, biologically active portions (peptides, e.g., peptides which are, for example, 5, 10, 15, 20, 30, 35, 36, 37, 38, 39, 40, 50, 100 or more amino acids in length) comprise a domain or motif with at least one activity of an HA protein. Moreover, other biologically active portions, in which other regions of the protein are deleted, can be prepared by recombinant techniques and evaluated for one or more of the activities described herein. Preferably, the biologically active portions of an HA protein include one or more selected domains/motifs or portions thereof having biological activity.

[0127] HA proteins are preferably produced by recombinant DNA techniques. For example, a nucleic acid molecule encoding the protein is cloned into an expression vector (as described above), the expression vector is introduced into a host cell (as described above) and the HA protein is expressed in the host cell. The HA protein can then be isolated from the cells by an appropriate purification scheme using standard protein purification techniques. Alternative to recombinant expression, an HA protein, polypeptide, or peptide can be synthesized chemically using standard peptide synthesis techniques. Moreover, native HA protein can be isolated from cells (e.g., endothelial cells), for example using an anti-HA antibody, which can be produced by standard techniques utilizing an HA protein or fragment thereof of this invention.

[0128] The invention also provides HA chimeric or fusion proteins. As used herein, an HA “chimeric protein” or “fusion protein” comprises an HA polypeptide operatively linked to a non-HA polypeptide. An “HA polypeptide” refers to a polypeptide having an amino acid sequence corresponding to an HA protein, whereas a “non-HA polypeptide” refers to a polypeptide having an amino acid sequence corresponding to a protein which is not substantially homologous to the HA protein, e.g., a protein which is different from the HA protein and which is derived from the same or a different organism. Within the fusion protein, the term “operatively linked” is intended to indicate that the HA polypeptide and the non-HA polypeptide are fused in-frame to each other. The non-HA polypeptide can be fused to the N-terminus or C-terminus of the HA polypeptide. For example, in one embodiment the fusion protein is a GST-HA fusion protein in which the HA sequences are fused to the C-terminus of the GST sequences. Such fusion proteins can facilitate the purification of recombinant HA proteins. In another embodiment, the fusion protein is an HA protein containing a heterologous signal sequence at its N-terminus. In certain host cells (e.g., mammalian host cells), expression and/or secretion of an HA protein can be increased through use of a heterologous signal sequence.

[0129] Preferably, an HA chimeric or fusion protein of the invention is produced by standard recombinant DNA techniques. For example, DNA fragments coding for the different polypeptide sequences are ligated together in-frame in accordance with conventional techniques, for example by employing blunt-ended or stagger-ended termini for ligation, restriction enzyme digestion to provide for appropriate termini, filling-in of cohesive ends as appropriate, alkaline phosphatase treatment to avoid undesirable joining, and enzymatic ligation. In another embodiment, the fusion gene can be synthesized by conventional techniques including automated DNA synthesizers. Alternatively, PCR amplification of gene fragments can be carried out using anchor primers which give rise to complementary overhangs between two consecutive gene fragments which can subsequently be annealed and reamplified to generate a chimeric gene sequence (see, for example, Current Protocols in Molecular Biology, eds. Ausubel et al. John Wiley & Sons: 1992). Moreover, many expression vectors are commercially available that already encode a fusion moiety (e.g., a GST polypeptide). An HA-encoding nucleic acid can be cloned into such an expression vector such that the fusion moiety is linked in-frame to the HA protein.

[0130] Homologues of the HA protein can be generated by mutagenesis, e.g., discrete point mutation or truncation of the HA protein. As used herein, the term “homologue” refers to a variant form of the HA protein which acts as an agonist or antagonist of the activity of the HA protein. An agonist of the HA protein can retain substantially the same, or a subset, of the biological activities of the HA protein. An antagonist of the HA protein can inhibit one or more of the activities of the naturally occurring form of the HA protein, by, for example, competitively binding to a downstream or upstream member of a biochemical cascade which includes the HA protein, by binding to a target molecule with which the HA protein interacts, such that no functional interaction is possible, or by binding directly to the HA protein and inhibiting its normal activity.

[0131] In an alternative embodiment, homologues of the HA protein can be identified by screening combinatorial libraries of mutants, e.g., truncation mutants, of the HA protein for HA protein agonist or antagonist activity. In one embodiment, a variegated library of HA variants is generated by combinatorial mutagenesis at the nucleic acid level and is encoded by a variegated gene library. A variegated library of HA variants can be produced by, for example, enzymatically ligating a mixture of synthetic oligonucleotides into gene sequences such that a degenerate set of potential HA sequences is expressible as individual polypeptides, or alternatively, as a set of larger fusion proteins (e.g., for phage display) containing the set of HA sequences therein. There are a variety of methods which can be used to produce libraries of potential HA homologues from a degenerate oligonucleotide sequence. Chemical synthesis of a degenerate gene sequence can be performed in an automatic DNA synthesizer, and the synthetic gene then ligated into an appropriate expression vector. Use of a degenerate set of genes allows for the provision, in one mixture, of all of the sequences encoding the desired set of potential HA sequences. Methods for synthesizing degenerate oligonucleotides are known in the art (see, e.g., Narang, S. A. (1983) Tetrahedron 39: 3; Itakura et al. (1984) Annu. Rev. Biochem. 53: 323; Itakura et al. (1984) Science 198: 1056; Ike et al. (1983) Nucleic Acid Res. 11: 477.

[0132] In addition, libraries of fragments of the HA protein coding can be used to generate a variegated population of HA fragments for screening and subsequent selection of homologues of an HA protein. In one embodiment, a library of coding sequence fragments can be generated by treating a double stranded PCR fragment of an HA coding sequence with a nuclease under conditions wherein nicking occurs only about once per molecule, denaturing the double stranded DNA, renaturing the DNA to form double stranded DNA which can include sense/antisense pairs from different nicked products, removing single stranded portions from reformed duplexes by treatment with S1 nuclease, and ligating the resulting fragment library into an expression vector. By this method, an expression library can be derived which encodes N-terminal, C-terminal and internal fragments of various sizes of the HA protein.

[0133] Several techniques are known in the art for screening gene products of combinatorial libraries made by point mutations or truncation, and for screening cDNA libraries for gene products having a selected property. Such techniques are adaptable for rapid screening of the gene libraries generated by the combinatorial mutagenesis of HA homologues. The most widely used techniques, which are amenable to high through-put analysis, for screening large gene libraries typically include cloning the gene library into replicable expression vectors, transforming appropriate cells with the resulting library of vectors, and expressing the combinatorial genes under conditions in which detection of a desired activity facilitates isolation of the vector encoding the gene whose product was detected. Recursive ensemble mutagenesis (REM), a new technique which enhances the frequency of functional mutants in the libraries, can be used in combination with the screening assays to identify HA homologues (Arkin and Yourvan (1992) PNAS 89: 7811-7815; Delgrave et al. (1993) Protein Engineering 6(3): 327-331).

[0134] In another embodiment, cell based assays can be exploited to analyze a variegated HA library, using methods well known in the art.

D. Uses and Methods of the Invention

[0135] The nucleic acid molecules, proteins, protein homologues, fusion proteins, primers, vectors, and host cells described herein can be used in one or more of the following methods: identification of C. glutamicum and related organisms; mapping of genomes of organisms related to C. glutamicum; identification and localization of C. glutamicum sequences of interest; evolutionary studies; determination of HA protein regions required for function; modulation of an HA protein activity; modulation of the metabolism of one or more inorganic compounds; modulation of the modification or degradation of one or more aromatic or aliphatic compounds; modulation of cell wall synthesis or rearrangements; modulation of enzyme activity or proteolysis; and modulation of cellular production of a desired compound, such as a fine chemical.

[0136] The HA nucleic acid molecules of the invention have a variety of uses. First, they may be used to identify an organism as being Corynebacterium glutamicum or a close relative thereof. Also, they may be used to identify the presence of C. glutamicum or a relative thereof in a mixed population of microorganisms. The invention provides the nucleic acid sequences of a number of C. glutamicum genes; by probing the extracted genomic DNA of a culture of a unique or mixed population of microorganisms under stringent conditions with a probe spanning a region of a C. glutamicum gene which is unique to this organism, one can ascertain whether this organism is present. Although Corynebacterium glutamicum itself is nonpathogenic, it is related to pathogenic species, such as Corynebacterium diphtheriae. Corynebacterium diphtheriae is the causative agent of diphtheria, a rapidly developing, acute, febrile infection which involves both local and systemic pathology. In this disease, a local lesion develops in the upper respiratory tract and involves necrotic injury to epithelial cells; the bacilli secrete toxin which is disseminated through this lesion to distal susceptible tissues of the body. Degenerative changes brought about by the inhibition of protein synthesis in these tissues, which include heart, muscle, peripheral nerves, adrenals, kidneys, liver and spleen, result in the systemic pathology of the disease. Diphtheria continues to have high incidence in many parts of the world, including Africa, Asia, Eastern Europe and the independent states of the former Soviet Union. An ongoing epidemic of diphtheria in the latter two regions has resulted in at least 5,000 deaths since 1990.

[0137] In one embodiment, the invention provides a method of identifying the presence or activity of Cornyebacterium diphtheriae in a subject. This method includes detection of one or more of the nucleic acid or amino acid sequences of the invention (e.g., the sequences set forth in Appendix A or Appendix B) in a subject, thereby detecting the presence or activity of Corynebacterium diphtheriae in the subject. C. glutamicum and C. diphtheriae are related bacteria, and many of the nucleic acid and protein molecules in C. glutamicum are homologous to C. diphtheriae nucleic acid and protein molecules, and can therefore be used to detect C. diphtheriae in a subject.

[0138] The nucleic acid and protein molecules of the invention may also serve as markers for specific regions of the genome. This has utility not only in the mapping of the genome, but also for functional studies of C. glutamicum proteins. For example, to identify the region of the genome to which a particular C. glutamicum DNA-binding protein binds, the C. glutamicum genome could be digested, and the fragments incubated with the DNA-binding protein. Those which bind the protein may be additionally probed with the nucleic acid molecules of the invention, preferably with readily detectable labels; binding of such a nucleic acid molecule to the genome fragment enables the localization of the fragment to the genome map of C. glutamicum, and, when performed multiple times with different enzymes, facilitates a rapid determination of the nucleic acid sequence to which the protein binds. Further, the nucleic acid molecules of the invention may be sufficiently homologous to the sequences of related species such that these nucleic acid molecules may serve as markers for the construction of a genomic map in related bacteria, such as Brevibacterium lactofermentum.

[0139] The HA nucleic acid molecules of the invention are also useful for evolutionary and protein structural studies. The processes involved in adaptation and the maintenance of homeostasis in which the molecules of the invention participate are utilized by a wide variety of species; by comparing the sequences of the nucleic acid molecules of the present invention to those encoding similar enzymes from other organisms, the evolutionary relatedness of the organisms can be assessed. Similarly, such a comparison permits an assessment of which regions of the sequence are conserved and which are not, which may aid in determining those regions of the protein which are essential for the functioning of the enzyme. This type of determination is of value for protein engineering studies and may give an indication of what the protein can tolerate in terms of mutagenesis without losing function.

[0140] Manipulation of the HA nucleic acid molecules of the invention may result in the production of HA proteins having functional differences from the wild-type HA proteins. These proteins may be improved in efficiency or activity, may be present in greater numbers in the cell than is usual, or may be decreased in efficiency or activity.

[0141] The invention provides methods for screening molecules which modulate the activity of an HA protein, either by interacting with the protein itself or a substrate or binding partner of the HA protein, or by modulating the transcription or translation of an HA nucleic acid molecule of the invention. In such methods, a microorganism expressing one or more HA proteins of the invention is contacted with one or more test compounds, and the effect of each test compound on the activity or level of expression of the HA protein is assessed.

[0142] The modulation of activity or number of HA proteins involved in cell wall biosynthesis or rearrangements may impact the production, yield, and/or efficiency of production of one or more fine chemicals from C. glutamicum cells. For example, by altering the activity of these proteins, it may be possible to modulate the structure or thickness of the cell wall. The cell wall serves in large measure as a protective device against osmotic lysis and external sources of injury; by modifying the cell wall it may be possible to increase the ability of C. glutamicum to withstand the mechanical and shear force stresses encountered by this microorganism during large-scale fermentor culture. Further, each C. glutamicum cell is surrounded by a thick cell wall, and thus, a significant portion of the biomass present in large scale culture consists of cell wall. By increasing the rate at which the cell wall is synthesized or by activating cell wall synthesis (through genetic engineering of the HA cell wall proteins of the invention) it may be possible to improve the growth rate of the microorganism. Similarly, by decreasing the activity or number of proteins involved in the degradation of cell wall or by decreasing the repression of cell wall biosynthesis, an overall increase in cell wall production may be achieved. An increase in the number of viable C. glutamicum cells (as may be accomplished by any of the foregoing described protein alterations) should result in increased numbers of cells producing the desired fine chemical in large-scale fermentor culture, which should permit increased yields or efficiency of production of these compounds from the culture.

[0143] The modulation of activity or number of C. glutamicum HA proteins that participate in the modification or degradation of aromatic or aliphatic compounds may also have direct or indirect impacts on the production of one or more fine chemicals from these cells. Certain aromatic or aliphatic modification or degradation products are desirable fine chemicals (e.g., organic acids or modified aromatic and aliphatic compounds); thus, by modifying the enzymes which perform these modifications (e.g., hydroxylation, methylation, or isomerization) or degradation reactions, it may be possible to increase the yields of these desired compounds. Similarly, by decreasing the activity or number of proteins involved in pathways which further degrade the modified or breakdown products of the aforementioned reactions it may be possible to improve the yields of these fine chemicals from C. glutamicum cells in culture.

[0144] These aromatic and aliphatic modification and degradative enzymes are themselves fine chemicals. In purified form, these enzymes may be used to degrade aromatic and aliphatic compounds (e.g., toxic chemicals such as petroleum products), either for the bioremediation of polluted sites, for the engineered decomposition of wastes, or for the large-scale and economically feasible production of desired modified aromatic or aliphatic compounds or their breakdown products, some of which may be conveniently used as carbon or energy sources for other fine chemical-producing compounds in culture (see, e.g., Faber, K. (1995) Biotransformations in Organic Chemistry, Springer: Berlin and references therein; and Roberts, S. M., ed. (1992-1996) Preparative Biotransformations, Wiley: Chichester, and references therein). By genetically altering these proteins such that their regulation by other cellular mechanisms is lessened or abolished, it may be possible to increase the overall number or activity of these proteins, thereby improving not only the yield of these fine chemicals but also the activity of these harvested proteins.

[0145] The modification of these aromatic and aliphatic modifying and degradation enzymes may also have an indirect effect on the production of one or more fine chemical. Many aromatic and aliphatic compounds (such as those that may be encountered as impurities in culture media or as waste products from cellular metabolism) are toxic to cells; by modifying and/or degrading these compounds such that they may be readily removed or destroyed, cellular viability should be increased. Further, these enzymes may modify or degrade these compounds in such a manner that the resulting products may enter the normal carbon metabolism pathways of the cell, thus rendering the cell able to use these compounds as alternate carbon or energy sources. In large-scale culture situations, when there may be limiting amounts of optimal carbon sources, these enzymes provide a method by which cells may continue to grow and divide using aromatic or aliphatic compounds as nutrients. In either case, the resulting increase in the number of C. glutamicum cells in the culture producing the desired fine chemical should in turn result in increased yields or efficiency of production of the fine chemical(s).

[0146] Modifications in activity or number of HA proteins involved in the metabolism of inorganic compounds may also directly or indirectly affect the production of one or more fine chemicals from C. glutamicum or related bacterial cultures. For example, many desirable fine chemicals, such as nucleic acids, amino acids, cofactors and vitamins (e.g., thiamine, biotin, and lipoic acid) cannot be synthesized without inorganic molecules such as phosphorous, nitrate, sulfate, and iron. The inorganic metabolism proteins of the invention permit the cell to obtain these molecules from a variety of inorganic compounds and to divert them into various fine chemical biosynthetic pathways. Therefore, by increasing the activity or number of enzymes involved in the metabolism of these inorganic compounds, it may be possible to increase the supply of these possibly limiting inorganic molecules, thereby directly increasing the production or efficiency of production of various fine chemicals from C. glutamicum cells containing such altered proteins. Modification of the activity or number of inorganic metabolism enzymes of the invention may also render C. glutamicum able to better utilize limited inorganic compound supplies, or to utilize nonoptimal inorganic compounds to synthesize amino acids, vitamins, cofactors, or nucleic acids, all of which are necessary for continued growth and replication of the cell. By improving the viability of these cells in large-scale culture, the number of C. glutamicum cells producing one or more fine chemicals in the culture may also be increased, in turn increasing the yields or efficiency of production of one or more fine chemicals.

[0147] C. glutamicum enzymes for general processes are themselves desirable fine chemicals. The specific properties of enzymes (i.e., regio- and stereospecificity, among others) make them useful catalysts for chemical reactions in vitro. Either whole C. glutamicum cells may be incubated with an appropriate substrate such that the desired product is produced by enzymes in the cell, or the desired enzymes may be overproduced and purified from C. glutamicum cultures (or those of a related bacterium) and subsequently utilized in in vitro reactions in an industrial setting (either in solution or immobilized on a suitable immobile phase). In either situation, the enzyme can either be a natural C. glutamicum protein, or it may be mutagenized to have an altered activity; typical industrial uses for such enzymes include as catalysts in the chemical industry (e.g., for synthetic organic chemistry) as food additives, as feed components, for fruit processing, for leather preparation, in detergents, in analysis and medicine, and in the textile industry (see, e.g., Yamada, H. (1993) “Microbial reactions for the production of useful organic compounds,” Chimica 47: 5-10; Roberts, S. M. (1998) Preparative biotransformations: the employment of enzymes and whole-cells in synthetic chemistry,” J. Chem. Soc. Perkin Trans. 1: 157-169; Zaks, A. and Dodds, D. R. (1997) “Application of biocatalysis and biotransformations to the synthesis of pharmaceuticals,” DDT 2: 513-531; Roberts, S. M. and Williamson, N. M. (1997) “The use of enzymes for the preparation of biologically active natural products and analogues in optically active form,” Curr. Organ. Chemistry 1: 1-20; Faber, K. (1995) Biotransformations in Organic Chemistry, Springer: Berlin; Roberts, S. M., ed. (1992-96) Preparative Biotransformations, Wiley: Chichester; Cheetham, P. S. J. (1995) “The applications of enzymes in industry” in: Handbook of Enzyme Biotechnology, 3^{rd} ed., Wiseman, A., ed., Elis: Horwood, p. 419-552; and Ullmann's Encyclopedia of Industrial Chemistry (1987), vol. A9, Enzymes, p. 390-457). Thus, by increasing the activity or number of these enzymes, it may be possible to also increase the ability of the cell to convert supplied substrates to desired products, or to overproduce these enzymes for increased yields in large-scale culture. Further, by mutagenizing these proteins it may be possible to remove feedback inhibition or other repressive cellular regulatory controls such that greater numbers of these enzymes may be produced and activated by the cell, thereby leading to greater yields, production, or efficiency of production of these fine chemical proteins from large-scale cultures. Further, manipulation of these enzymes may alter the activity of one or more C. glutamicum metabolic pathways, such as those for the biosynthesis or secretion of one or more fine chemicals.

[0148] Mutagenesis of the proteolytic enzymes of the invention such that they are altered in activity or number may also directly or indirectly affect the yield, production, and/or efficiency of production of one or more fine chemicals from C. glutamicum. For example, by increasing the activity or number of these proteins, it may be possible to increase the ability of the bacterium to survive in large-scale culture, due to an increased ability of the cell to rapidly degrade proteins misfolded in response to the high temperatures, nonoptimal pH, and other stresses encountered during fermentor culture. Increased numbers of cells in these cultures may result in increased yields or efficiency of production of one or more desired fine chemicals, due to the relatively larger number of cells producing these compounds in the culture. Also, C. glutamicum cells possess multiple cell-surface proteases which serve to break down external nutrients into molecules which may be more readily incorporated by the cells as carbon/energy sources or nutrients of other kinds. An increase in activity or number of these enzymes may improve this turnover and increase the levels of available nutrients, thereby improving cell growth or production. Thus, modifications of the proteases of the invention may indirectly impact C. glutamicum fine chemical production.

[0149] A more direct impact on fine chemical production in response to the modification of one or more of the proteases of the invention may occur when these proteases are involved in the production or degradation of a desired fine chemical. By decreasing the activity of a protease which degrades a fine chemical or a protein involved in the synthesis of a fine chemical it may be possible to increase the levels of that fine chemical (due to the decreased degradation or increased synthesis of the compound). Similarly, by increasing the activity of a protease which degrades a compound to result in a fine chemical or a protein involved in the degradation of a fine chemical, a similar result should be achieved: increased levels of the desired fine chemical from C. glutamicum cells containing these engineered proteins.

[0150] The aforementioned mutagenesis strategies for HA proteins to result in increased yields of a fine chemical from C. glutamicum are not meant to be limiting; variations on these strategies will be readily apparent to one of ordinary skill in the art. Using such strategies, and incorporating the mechanisms disclosed herein, the nucleic acid and protein molecules of the invention may be utilized to generate C. glutamicum or related strains of bacteria expressing mutated HA nucleic acid and protein molecules such that the yield, production, and/or efficiency of production of a desired compound is improved. This desired compound may be any product produced by C. glutamicum, which includes the final products of biosynthesis pathways and intermediates of naturally-occurring metabolic pathways, as well as molecules which do not naturally occur in the metabolism of C. glutamicum, but which are produced by a C. glutamicum strain of the invention.

[0151] This invention is further illustrated by the following examples which should not be construed as limiting. The contents of all references, patent applications, patents, published patent applications, Tables, Appendices, and the sequence listing cited throughout this application are hereby incorporated by reference.

Exemplification

### EXAMPLE 1

### Preparation of Total Genomic DNA of Corynebacterium Glutamicum ATCC 13032

[0152] A culture of Corynebacterium glutamicum (ATCC 13032) was grown overnight at 30° C. with vigorous shaking in BHI medium (Difco). The cells were harvested by centrifugation, the supernatant was discarded and the cells were resuspended in 5 ml buffer-I (5% of the original volume of the culture—all indicated volumes have been calculated for 100 ml of culture volume). Composition of buffer-I: 140.34 g/l sucrose, 2.46 g/l MgSO₄×7H₂O, 10 ml/l KH₂PO₄ solution (100 g/l, adjusted to pH 6.7 with KOH), 50 ml/l M12 concentrate (10 g/l (NH₄)₂SO₄, 1 g/l NaCl, 2 g/l MgSO₄×7H₂O, 0.2 g/l CaCl₂, 0.5 g/l yeast extract (Difco), 10 ml/l trace-elements-mix (200 mg/l FeSO₄×H₂O, 10 mg/l ZnSO₄×7H₂O, 3 mg/l MnCl₂×4H₂O, 30 mg/l H₂BO₃ 20 mg/l CoCl₂×6H₂O, 1 mg/l NiCl₂×6H₂O, 3 mg/l Na₂MoO₄×2H₂O, 500 mg/l complexing agent (EDTA or critic acid), 100 ml/l vitamins-mix (0.2 mg/l biotin, 0.2 mg/l folic acid, 20 mg/l p-amino benzoic acid, 20 mg/l riboflavin, 40 mg/l ca-panthothenate, 140 mg/l nicotinic acid, 40 mg/l pyridoxole hydrochloride, 200 mg/l myo-inositol). Lysozyme was added to the suspension to a final concentration of 2.5 mg/ml. After an approximately 4 h incubation at 37° C., the cell wall was degraded and the resulting protoplasts are harvested by centrifugation. The pellet was washed once with 5 ml buffer-I and once with 5 ml TE-buffer (10 mM Tris-HCl, 1 mM EDTA, pH 8). The pellet was resuspended in 4 ml TE-buffer and 0.5 ml SDS solution (10%) and 0.5 ml NaCl solution (5 M) are added. After adding of proteinase K to a final concentration of 200 μg/ml, the suspension is incubated for ca. 18 h at 37° C. The DNA was purified by extraction with phenol, phenol-chloroform-isoamylalcohol and chloroform-isoamylalcohol using standard procedures. Then, the DNA was precipitated by adding 1/50 volume of 3 M sodium acetate and 2 volumes of ethanol, followed by a 30 min incubation at −20° C. and a 30 min centrifugation at 12,000 rpm in a high speed centrifuge using a SS34 rotor (Sorvall). The DNA was dissolved in 1 ml TE-buffer containing 20 μg/ml RNaseA and dialysed at 4° C. against 1000 ml TE-buffer for at least 3 hours. During this time, the buffer was exchanged 3 times. To aliquots of 0.4 ml of the dialysed DNA solution, 0.4 ml of 2 M LiCl and 0.8 ml of ethanol are added. After a 30 min incubation at −20° C., the DNA was collected by centrifugation (13,000 rpm, Biofuge Fresco, Heraeus, Hanau, Germany). The DNA pellet was dissolved in TE-buffer. DNA prepared by this procedure could be used for all purposes, including southern blotting or construction of genomic libraries.

### EXAMPLE 2

### Construction of Genomic Libraries in Escherichia Coli of Corynebacterium Glutamicum ATCC13032

[0153] Using DNA prepared as described in Example 1, cosmid and plasmid libraries were constructed according to known and well established methods (see e.g., Sambrook, J. et al. (1989) “Molecular Cloning: A Laboratory Manual”, Cold Spring Harbor Laboratory Press, or Ausubel, F. M. et al. (1994) “Current Protocols in Molecular Biology”, John Wiley & Sons.)

[0154] Any plasmid or cosmid could be used. Of particular use were the plasmids pBR322 (Sutcliffe, J. G. (1979) Proc. Natl. Acad. Sci. USA, 75: 3737-3741); pACYC177 (Change & Cohen (1978) J. Bacteriol 134: 1141-1156), plasmids of the pBS series (pBSSK+, pBSSK− and others; Stratagene, LaJolla, USA), or cosmids as SuperCos1 (Stratagene, LaJolla, USA) or Lorist6 (Gibson, T. J., Rosenthal A. and Waterson, R. H. (1987) Gene 53: 283-286. Gene libraries specifically for use in C. glutamicum may be constructed using plasmid pSL109 (Lee, H.-S. and A. J. Sinskey (1994) J. Microbiol. Biotechnol. 4: 256-263).

### EXAMPLE 3

### DNA Sequencing and Computational Functional Analysis

[0155] Genomic libraries as described in Example 2 were used for DNA sequencing according to standard methods, in particular by the chain termination method using ABI377 sequencing machines (see e.g., Fleischman, R. D. et al. (1995) “Whole-genome Random Sequencing and Assembly of Haemophilus Influenzae Rd., Science, 269: 496-512). Sequencing primers with the following nucleotide sequences were used:

5′-GGAAACAGTATGACCATG-3′
or
5′-GTAAAACGACGGCCAGT-3′.

### EXAMPLE 4

### In Vivo Mutagenesis

[0156] In vivo mutagenesis of Corynebacterium glutamicum can be performed by passage of plasmid (or other vector) DNA through E. coli or other microorganisms (e.g. Bacillus spp. or yeasts such as Saccharomyces cerevisiae) which are impaired in their capabilities to maintain the integrity of their genetic information. Typical mutator strains have mutations in the genes for the DNA repair system (e.g., mutHLS, mutD, mutT, etc.; for reference, see Rupp, W. D. (1996) DNA repair mechanisms, in: Escherichia coli and Salmonella, p. 2277-2294, ASM: Washington.) Such strains are well known to those of ordinary skill in the art. The use of such strains is illustrated, for example, in Greener, A. and Callahan, M. (1994) Strategies 7: 32-34.

### EXAMPLE 5

### DNA Transfer Between Escherichia Coli and Corynebacterium Glutamicum

[0157] Several Corynebacterium and Brevibacterium species contain endogenous plasmids (as e.g., pHM1519 or pBL1) which replicate autonomously (for review see, e.g., Martin, J. F. et al. (1987) Biotechnology, 5: 137-146). Shuttle vectors for Escherichia coli and Corynebacterium glutamicum can be readily constructed by using standard vectors for E. coli (Sambrook, J. et al. (1989), “Molecular Cloning: A Laboratory Manual”, Cold Spring Harbor Laboratory Press or Ausubel, F. M. et al. (1994) “Current Protocols in Molecular Biology”, John Wiley & Sons) to which a origin or replication for and a suitable marker from Corynebacterium glutamicum is added. Such origins of replication are preferably taken from endogenous plasmids isolated from Corynebacterium and Brevibacterium species. Of particular use as transformation markers for these species are genes for kanamycin resistance (such as those derived from the Tn5 or Tn903 transposons) or chloramphenicol (Winnacker, E. L. (1987) “From Genes to Clones—Introduction to Gene Technology, VCH, Weinheim). There are numerous examples in the literature of the construction of a wide variety of shuttle vectors which replicate in both E. coli and C. glutamicum, and which can be used for several purposes, including gene over-expression (for reference, see e.g., Yoshihama, M. et al. (1985) J. Bacteriol. 162: 591-597, Martin J. F. et al. (1987) Biotechnology, 5: 137-146 and Eikmanns, B. J. et al. (1991) Gene, 102: 93-98).

[0158] Using standard methods, it is possible to clone a gene of interest into one of the shuttle vectors described above and to introduce such a hybrid vectors into strains of Corynebacterium glutamicum. Transformation of C. glutamicum can be achieved by protoplast transformation (Kastsumata, R. et al. (1984) J. Bacteriol. 159306-311), electroporation (Liebl, E. et al. (1989) FEMS Microbiol. Letters, 53: 399-303) and in cases where special vectors are used, also by conjugation (as described e.g. in Schäfer, A et al. (1990) J. Bacteriol. 172: 1663-1666). It is also possible to transfer the shuttle vectors for C. glutamicum to E. coli by preparing plasmid DNA from C. glutamicum (using standard methods well-known in the art) and transforming it into E. coli. This transformation step can be performed using standard methods, but it is advantageous to use an Mcr-deficient E. coli strain, such as NM522 (Gough & Murray (1983) J. Mol. Biol. 166: 1-19).

[0159] Genes may be overexpressed in C. glutamicum strains using plasmids which comprise pCG1 (U.S. Pat. No. 4,617,267) or fragments thereof, and optionally the gene for kanamycin resistance from TN903 (Grindley, N. D. and Joyce, C. M. (1980) Proc. Natl. Acad. Sci. USA 77(12): 7176-7180). In addition, genes may be overexpressed in C. glutamicum strains using plasmid pSL109 (Lee, H.-S. and A. J. Sinskey (1994) J. Microbiol. Biotechnol. 4: 256-263).

[0160] Aside from the use of replicative plasmids, gene overexpression can also be achieved by integration into the genome. Genomic integration in C. glutamicum or other Corynebacterium or Brevibacterium species may be accomplished by well-known methods, such as homologous recombination with genomic region(s), restriction endonuclease mediated integration (REMI) (see, e.g., DE Patent 19823834), or through the use of transposons. It is also possible to modulate the activity of a gene of interest by modifying the regulatory regions (e.g., a promoter, a repressor, and/or an enhancer) by sequence modification, insertion, or deletion using site-directed methods (such as homologous recombination) or methods based on random events (such as transposon mutagenesis or REMI). Nucleic acid sequences which function as transcriptional terminators may also be inserted 3′ to the coding region of one or more genes of the invention; such terminators are well-known in the art and are described, for example, in Winnacker, E. L. (1987) From Genes to Clones—Introduction to Gene Technology. VCH: Weinheim.

### EXAMPLE 6

### Assessment of the Expression of the Mutant Protein

[0161] Observations of the activity of a mutated protein in a transformed host cell rely on the fact that the mutant protein is expressed in a similar fashion and in a similar quantity to that of the wild-type protein. A useful method to ascertain the level of transcription of the mutant gene (an indicator of the amount of mRNA available for translation to the gene product) is to perform a Northern blot (for reference see, for example, Ausubel et al. (1988) Current Protocols in Molecular Biology, Wiley: New York), in which a primer designed to bind to the gene of interest is labeled with a detectable tag (usually radioactive or chemiluminescent), such that when the total RNA of a culture of the organism is extracted, run on gel, transferred to a stable matrix and incubated with this probe, the binding and quantity of binding of the probe indicates the presence and also the quantity of mRNA for this gene. This information is evidence of the degree of transcription of the mutant gene. Total cellular RNA can be prepared from Corynebacterium glutamicum by several methods, all well-known in the art, such as that described in Bormann, E. R. et al. (1992) Mol. Microbiol. 6: 317-326.

[0162] To assess the presence or relative quantity of protein translated from this mRNA, standard techniques, such as a Western blot, may be employed (see, for example, Ausubel et al. (1988) Current Protocols in Molecular Biology, Wiley: New York). In this process, total cellular proteins are extracted, separated by gel electrophoresis, transferred to a matrix such as nitrocellulose, and incubated with a probe, such as an antibody, which specifically binds to the desired protein. This probe is generally tagged with a chemiluminescent or colorimetric label which may be readily detected. The presence and quantity of label observed indicates the presence and quantity of the desired mutant protein present in the cell.

### EXAMPLE 7

### Growth of Genetically Modified Corynebacterium Glutamicum—Media and Culture Conditions

[0163] Genetically modified Corynebacteria are cultured in synthetic or natural growth media. A number of different growth media for Corynebacteria are both well-known and readily available (Lieb et al. (1989) Appl. Microbiol. Biotechnol., 32: 205-210; von der Osten et al. (1998) Biotechnology Letters, 11: 11-16; Patent DE 4,120,867; Liebl (1992) “The Genus Corynebacterium, in: The Procaryotes, Volume II, Balows, A. et al., eds. Springer-Verlag). These media consist of one or more carbon sources, nitrogen sources, inorganic salts, vitamins and trace elements. Preferred carbon sources are sugars, such as mono-, di-, or polysaccharides. For example, glucose, fructose, mannose, galactose, ribose, sorbose, ribulose, lactose, maltose, sucrose, raffinose, starch or cellulose serve as very good carbon sources. It is also possible to supply sugar to the media via complex compounds such as molasses or other by-products from sugar refinement. It can also be advantageous to supply mixtures of different carbon sources. Other possible carbon sources are alcohols and organic acids, such as methanol, ethanol, acetic acid or lactic acid. Nitrogen sources are usually organic or inorganic nitrogen compounds, or materials which contain these compounds. Exemplary nitrogen sources include ammonia gas or ammonia salts, such as NH₄Cl or (NH₄)₂SO₄, NH₄OH, nitrates, urea, amino acids or complex nitrogen sources like corn steep liquor, soy bean flour, soy bean protein, yeast extract, meat extract and others.

[0164] Inorganic salt compounds which may be included in the media include the chloride-, phosphorous- or sulfate-salts of calcium, magnesium, sodium, cobalt, molybdenum, potassium, manganese, zinc, copper and iron. Chelating compounds can be added to the medium to keep the metal ions in solution. Particularly useful chelating compounds include dihydroxyphenols, like catechol or protocatechuate, or organic acids, such as citric acid. It is typical for the media to also contain other growth factors, such as vitamins or growth promoters, examples of which include biotin, riboflavin, thiamin, folic acid, nicotinic acid, pantothenate and pyridoxin. Growth factors and salts frequently originate from complex media components such as yeast extract, molasses, corn steep liquor and others. The exact composition of the media compounds depends strongly on the immediate experiment and is individually decided for each specific case. Information about media optimization is available in the textbook “Applied Microbiol. Physiology, A Practical Approach (eds. P. M. Rhodes, P. F. Stanbury, IRL Press (1997) pp. 53-73, ISBN 0 19 963577 3). It is also possible to select growth media from commercial suppliers, like standard 1 (Merck) or BHI (grain heart infusion, DIFCO) or others.

[0165] All medium components are sterilized, either by heat (20 minutes at 1.5 bar and 121° C.) or by sterile filtration. The components can either be sterilized together or, if necessary, separately. All media components can be present at the beginning of growth, or they can optionally be added continuously or batchwise.

[0166] Culture conditions are defined separately for each experiment. The temperature should be in a range between 15° C. and 45° C. The temperature can be kept constant or can be altered during the experiment. The pH of the medium should be in the range of 5 to 8.5, preferably around 7.0, and can be maintained by the addition of buffers to the media. An exemplary buffer for this purpose is a potassium phosphate buffer. Synthetic buffers such as MOPS, HEPES, ACES and others can alternatively or simultaneously be used. It is also possible to maintain a constant culture pH through the addition of NaOH or NH₄OH during growth. If complex medium components such as yeast extract are utilized, the necessity for additional buffers may be reduced, due to the fact that many complex compounds have high buffer capacities. If a fermentor is utilized for culturing the micro-organisms, the pH can also be controlled using gaseous ammonia.

[0167] The incubation time is usually in a range from several hours to several days. This time is selected in order to permit the maximal amount of product to accumulate in the broth. The disclosed growth experiments can be carried out in a variety of vessels, such as microtiter plates, glass tubes, glass flasks or glass or metal fermentors of different sizes. For screening a large number of clones, the microorganisms should be cultured in microtiter plates, glass tubes or shake flasks, either with or without baffles. Preferably 100 ml shake flasks are used, filled with 10% (by volume) of the required growth medium. The flasks should be shaken on a rotary shaker (amplitude 25 mm) using a speed-range of 100-300 rpm. Evaporation losses can be diminished by the maintenance of a humid atmosphere; alternatively, a mathematical correction for evaporation losses should be performed.

[0168] If genetically modified clones are tested, an unmodified control clone or a control clone containing the basic plasmid without any insert should also be tested. The medium is inoculated to an OD₆₀₀ of 0.5-1.5 using cells grown on agar plates, such as CM plates (10 g/l glucose, 2,5 g/l NaCl, 2 g/l urea, 10 g/l polypeptone, 5 g/l yeast extract, 5 g/l meat extract, 22 g/l NaCl, 2 g/l urea, 10 g/l polypeptone, 5 g/l yeast extract, 5 g/l meat extract, 22 g/l agar, pH 6.8 with 2M NaOH) that had been incubated at 30° C. Inoculation of the media is accomplished by either introduction of a saline suspension of C. glutamicum cells from CM plates or addition of a liquid preculture of this bacterium.

### EXAMPLE 8

### In Vitro Analysis of the Function of Mutant Proteins

[0169] The determination of activities and kinetic parameters of enzymes is well established in the art. Experiments to determine the activity of any given altered enzyme must be tailored to the specific activity of the wild-type enzyme, which is well within the ability of one of ordinary skill in the art. Overviews about enzymes in general, as well as specific details concerning structure, kinetics, principles, methods, applications and examples for the determination of many enzyme activities may be found, for example, in the following references: Dixon, M., and Webb, E. C., (1979) Enzymes. Longmans: London; Fersht, (1985) Enzyme Structure and Mechanism. Freeman: New York; Walsh, (1979) Enzymatic Reaction Mechanisms. Freeman: San Francisco; Price, N. C., Stevens, L. (1982) Fundamentals of Enzymology. Oxford Univ. Press: Oxford; Boyer, P. D., ed. (1983) The Enzymes, 3^{rd} ed. Academic Press: New York; Bisswanger, H., (1994) Enzymkinetik, 2^{nd} ed. VCH: Weinheim (ISBN 3527300325); Bergmeyer, H. U., Bergmeyer, J., Graβl, M., eds. (1983-1986) Methods of Enzymatic Analysis, 3^{rd} ed., vol. I-XII, Verlag Chemie: Weinheim; and Ullmann's Encyclopedia of Industrial Chemistry (1987) vol. A9, “Enzymes”. VCH: Weinheim, p. 352-363.

[0170] The activity of proteins which bind to DNA can be measured by several well-established methods, such as DNA band-shift assays (also called gel retardation assays). The effect of such proteins on the expression of other molecules can be measured using reporter gene assays (such as that described in Kolmar, H. et al. (1995) EMBO J. 14: 3895-3904 and references cited therein). Reporter gene test systems are well known and established for applications in both pro- and eukaryotic cells, using enzymes such as beta-galactosidase, green fluorescent protein, and several others.

[0171] The determination of activity of membrane-transport proteins can be performed according to techniques such as those described in Gennis, R. B. (1989) “Pores, Channels and Transporters”, in Biomembranes, Molecular Structure and Function, Springer: Heidelberg, p. 85-137; 199-234; and 270-322.

### EXAMPLE 9

### Analysis of Impact of Mutant Protein on the Production of the Desired Product

[0172] The effect of the genetic modification in C. glutamicum on production of a desired compound (such as an amino acid) can be assessed by growing the modified microorganism under suitable conditions (such as those described above) and analyzing the medium and/or the cellular component for increased production of the desired product (i.e., an amino acid). Such analysis techniques are well known to one of ordinary skill in the art, and include spectroscopy, thin layer chromatography, staining methods of various kinds, enzymatic and microbiological methods, and analytical chromatography such as high performance liquid chromatography (see, for example, Ullman, Encyclopedia of Industrial Chemistry, vol. A2, p. 89-90 and p. 443-613, VCH: Weinheim (1985); Fallon, A. et al., (1987) “Applications of HPLC in Biochemistry” in: Laboratory Techniques in Biochemistry and Molecular Biology, vol. 17; Rehm et al. (1993) Biotechnology, vol. 3, Chapter III: “Product recovery and purification”, page 469-714, VCH: Weinheim; Belter, P. A. et al. (1988) Bioseparations: downstream processing for biotechnology, John Wiley and Sons; Kennedy, J. F. and Cabral, J. M. S. (1992) Recovery processes for biological materials, John Wiley and Sons; Shaeiwitz, J. A. and Henry, J. D. (1988) Biochemical separations, in: Ulmann's Encyclopedia of Industrial Chemistry, vol. B3, Chapter 11, page 1-27, VCH: Weinheim; and Dechow, F. J. (1989) Separation and purification techniques in biotechnology, Noyes Publications.)

[0173] In addition to the measurement of the final product of fermentation, it is also possible to analyze other components of the metabolic pathways utilized for the production of the desired compound, such as intermediates and side-products, to determine the overall efficiency of production of the compound. Analysis methods include measurements of nutrient levels in the medium (e.g., sugars, hydrocarbons, nitrogen sources, phosphate, and other ions), measurements of biomass composition and growth, analysis of the production of common metabolites of biosynthetic pathways, and measurement of gasses produced during fermentation. Standard methods for these measurements are outlined in Applied Microbial Physiology, A Practical Approach, P. M. Rhodes and P. F. Stanbury, eds., IRL Press, p. 103-129; 131-163; and 165-192 (ISBN: 0199635773) and references cited therein.

### EXAMPLE 10

### Purification of the Desired Product from C. Glutamicum Culture

[0174] Recovery of the desired product from the C. glutamicum cells or supernatant of the above-described culture can be performed by various methods well known in the art. If the desired product is not secreted from the cells, the cells can be harvested from the culture by low-speed centrifugation, the cells can be lysed by standard techniques, such as mechanical force or sonication. The cellular debris is removed by centrifugation, and the supernatant fraction containing the soluble proteins is retained for further purification of the desired compound. If the product is secreted from the C. glutamicum cells, then the cells are removed from the culture by low-speed centrifugation, and the supernate fraction is retained for further purification.

[0175] The supernatant fraction from either purification method is subjected to chromatography with a suitable resin, in which the desired molecule is either retained on a chromatography resin while many of the impurities in the sample are not, or where the impurities are retained by the resin while the sample is not. Such chromatography steps may be repeated as necessary, using the same or different chromatography resins. One of ordinary skill in the art would be well-versed in the selection of appropriate chromatography resins and in their most efficacious application for a particular molecule to be purified. The purified product may be concentrated by filtration or ultrafiltration, and stored at a temperature at which the stability of the product is maximized.

[0176] There are a wide array of purification methods known to the art and the preceding method of purification is not meant to be limiting. Such purification techniques are described, for example, in Bailey, J. E. & Ollis, D. F. Biochemical Engineering Fundamentals, McGraw-Hill: New York (1986).

[0177] The identity and purity of the isolated compounds may be assessed by techniques standard in the art. These include high-performance liquid chromatography (HPLC), spectroscopic methods, staining methods, thin layer chromatography, NIRS, enzymatic assay, or microbiologically. Such analysis methods are reviewed in: Patek et al. (1994) Appl. Environ. Microbiol. 60: 133-140; Malakhova et al. (1996) Biotekhnologiya 11: 27-32; and Schmidt et al. (1998) Bioprocess Engineer. 19: 67-70. Ulmann's Encyclopedia of Industrial Chemistry, (1996) vol. A27, VCH: Weinheim, p. 89-90, p. 521-540, p. 540-547, p. 559-566, 575-581 and p. 581-587; Michal, G. (1999) Biochemical Pathways: An Atlas of Biochemistry and Molecular Biology, John Wiley and Sons; Fallon, A. et al. (1987) Applications of HPLC in Biochemistry in: Laboratory Techniques in Biochemistry and Molecular Biology, vol. 17.

### EXAMPLE 11

### Analysis of the Gene Sequences of the Invention

[0178] The comparison of sequences and determination of percent homology between two sequences are art-known techniques, and can be accomplished using a mathematical algorithm, such as the algorithm of Karlin and Altschul (1990) Proc. Natl. Acad. Sci. USA 87: 2264-68, modified as in Karlin and Altschul (1993) Proc. Natl. Acad. Sci. USA 90: 5873-77. Such an algorithm is incorporated into the NBLAST and XBLAST programs (version 2.0) of Altschul, et al. (1990) J. Mol. Biol. 215: 403-10. BLAST nucleotide searches can be performed with the NBLAST program, score=100, wordlength=12 to obtain nucleotide sequences homologous to HA nucleic acid molecules of the invention. BLAST protein searches can be performed with the XBLAST program, score=50, wordlength=3 to obtain amino acid sequences homologous to HA protein molecules of the invention. To obtain gapped alignments for comparison purposes, Gapped BLAST can be utilized as described in Altschul et al., (1997) Nucleic Acids Res. 25(17): 3389-3402. When utilizing BLAST and Gapped BLAST programs, one of ordinary skill in the art will know how to optimize the parameters of the program (e.g., XBLAST and NBLAST) for the specific sequence being analyzed.

[0179] Another example of a mathematical algorithm utilized for the comparison of sequences is the algorithm of Meyers and Miller ((1988) Comput. Appl. Biosci. 4: 11-17). Such an algorithm is incorporated into the ALIGN program (version 2.0) which is part of the GCG sequence alignment software package. When utilizing the ALIGN program for comparing amino acid sequences, a PAM120 weight residue table, a gap length penalty of 12, and a gap penalty of 4 can be used. Additional algorithms for sequence analysis are known in the art, and include ADVANCE and ADAM. described in Torelli and Robotti (1994) Comput. Appl. Biosci. 10: 3-5; and FASTA, described in Pearson and Lipman (1988) P.N.A.S. 85: 2444-8.

[0180] The percent homology between two amino acid sequences can also be accomplished using the GAP program in the GCG software package (available at http://www.gcg.com), using either a Blosum 62 matrix or a PAM250 matrix, and a gap weight of 12, 10, 8, 6, or 4 and a length weight of 2, 3, or 4. The percent homology between two nucleic acid sequences can be accomplished using the GAP program in the GCG software package, using standard parameters, such as a gap weight of 50 and a length weight of 3.

[0181] A comparative analysis of the gene sequences of the invention with those present in Genbank has been performed using techniques known in the art (see, e.g., Bexevanis and Ouellette, eds. (1998) Bioinformatics: A Practical Guide to the Analysis of Genes and Proteins. John Wiley and Sons: New York). The gene sequences of the invention were compared to genes present in Genbank in a three-step process. In a first step, a BLASTN analysis (e.g., a local alignment analysis) was performed for each of the sequences of the invention against the nucleotide sequences present in Genbank, and the top 500 hits were retained for further analysis. A subsequent FASTA search (e.g., a combined local and global alignment analysis, in which limited regions of the sequences are aligned) was performed on these 500 hits. Each gene sequence of the invention was subsequently globally aligned to each of the top three FASTA hits, using the GAP program in the GCG software package (using standard parameters). In order to obtain correct results, the length of the sequences extracted from Genbank were adjusted to the length of the query sequences by methods well-known in the art. The results of this analysis are set forth in Table 4. The resulting data is identical to that which would have been obtained had a GAP (global) analysis alone been performed on each of the genes of the invention in comparison with each of the references in Genbank, but required significantly reduced computational time as compared to such a database-wide GAP (global) analysis. Sequences of the invention for which no alignments above the cutoff values were obtained are indicated on Table 4 by the absence of alignment information. It will further be understood by one of ordinary skill in the art that the GAP alignment homology percentages set forth in Table 4 under the heading “% homology (GAP)” are listed in the European numerical format, wherein a ‘,’ represents a decimal point. For example, a value of “40,345” in this column represents “40.345%”.

### EXAMPLE 12

### Construction and Operation of DNA Microarrays

[0182] The sequences of the invention may additionally be used in the construction and application of DNA microarrays (the design, methodology, and uses of DNA arrays are well known in the art, and are described, for example, in Schena, M. et al. (1995) Science 270: 467-470; Wodicka, L. et al. (1997) Nature Biotechnology 15: 1359-1367; DeSaizieu, A. et al. (1998) Nature Biotechnology 16: 45-48; and DeRisi, J. L. et al. (1997) Science 278: 680-686).

[0183] DNA microarrays are solid or flexible supports consisting of nitrocellulose, nylon, glass, silicone, or other materials. Nucleic acid molecules may be attached to the surface in an ordered manner. After appropriate labeling, other nucleic acids or nucleic acid mixtures can be hybridized to the immobilized nucleic acid molecules, and the label may be used to monitor and measure the individual signal intensities of the hybridized molecules at defined regions. This methodology allows the simultaneous quantification of the relative or absolute amount of all or selected nucleic acids in the applied nucleic acid sample or mixture. DNA microarrays, therefore, permit an analysis of the expression of multiple (as many as 6800 or more) nucleic acids in parallel (see, e.g., Schena, M. (1996) BioEssays 18(5): 427-431).

[0184] The sequences of the invention may be used to design oligonucleotide primers which are able to amplify defined regions of one or more C. glutamicum genes by a nucleic acid amplification reaction such as the polymerase chain reaction. The choice and design of the 5′ or 3′ oligonucleotide primers or of appropriate linkers allows the covalent attachment of the resulting PCR products to the surface of a support medium described above (and also described, for example, Schena, M. et al. (1995) Science 270: 467-470).

[0185] Nucleic acid microarrays may also be constructed by in situ oligonucleotide synthesis as described by Wodicka, L. et al. (1997) Nature Biotechnology 15: 1359-1367. By photolithographic methods, precisely defined regions of the matrix are exposed to light. Protective groups which are photolabile are thereby activated and undergo nucleotide addition, whereas regions that are masked from light do not undergo any modification. Subsequent cycles of protection and light activation permit the synthesis of different oligonucleotides at defined positions. Small, defined regions of the genes of the invention may be synthesized on microarrays by solid phase oligonucleotide synthesis.

[0186] The nucleic acid molecules of the invention present in a sample or mixture of nucleotides may be hybridized to the microarrays. These nucleic acid molecules can be labeled according to standard methods. In brief, nucleic acid molecules (e.g., mRNA molecules or DNA molecules) are labeled by the incorporation of isotopically or fluorescently labeled nucleotides, e.g., during reverse transcription or DNA synthesis. Hybridization of labeled nucleic acids to microarrays is described (e.g., in Schena, M. et al. (1995) supra; Wodicka, L. et al. (1997), supra; and DeSaizieu A. et al. (1998), supra). The detection and quantification of the hybridized molecule are tailored to the specific incorporated label. Radioactive labels can be detected, for example, as described in Schena, M. et al. (1995) supra) and fluorescent labels may be detected, for example, by the method of Shalon et al. (1996) Genome Research 6: 639-645).

[0187] The application of the sequences of the invention to DNA microarray technology, as described above, permits comparative analyses of different strains of C. glutamicum or other Corynebacteria. For example, studies of inter-strain variations based on individual transcript profiles and the identification of genes that are important for specific and/or desired strain properties such as pathogenicity, productivity and stress tolerance are facilitated by nucleic acid array methodologies. Also, comparisons of the profile of expression of genes of the invention during the course of a fermentation reaction are possible using nucleic acid array technology.

### EXAMPLE 13

### Analysis of the Dynamics of Cellular Protein Populations

(Proteomics)

[0188] The genes, compositions, and methods of the invention may be applied to study the interactions and dynamics of populations of proteins, termed ‘proteomics’. Protein populations of interest include, but are not limited to, the total protein population of C. glutamicum (e.g., in comparison with the protein populations of other organisms), those proteins which are active under specific environmental or metabolic conditions (e.g., during fermentation, at high or low temperature, or at high or low pH), or those proteins which are active during specific phases of growth and development.

[0189] Protein populations can be analyzed by various well-known techniques, such as gel electrophoresis. Cellular proteins may be obtained, for example, by lysis or extraction, and may be separated from one another using a variety of electrophoretic techniques. Sodium dodecyl sulfate polyacrylamide gel electrophoresis (SDS-PAGE) separates proteins largely on the basis of their molecular weight. Isoelectric focusing polyacrylamide gel electrophoresis (IEF-PAGE) separates proteins by their isoelectric point (which reflects not only the amino acid sequence but also posttranslational modifications of the protein). Another, more preferred method of protein analysis is the consecutive combination of both IEF-PAGE and SDS-PAGE, known as 2-D-gel electrophoresis (described, for example, in Hermann et al. (1998) Electrophoresis 19: 3217-3221; Fountoulakis et al. (1998) Electrophoresis 19: 1193-1202; Langen et al. (1997) Electrophoresis 18: 1184-1192; Antelmann et al. (1997) Electrophoresis 18: 1451-1463). Other separation techniques may also be utilized for protein separation, such as capillary gel electrophoresis; such techniques are well known in the art.

[0190] Proteins separated by these methodologies can be visualized by standard techniques, such as by staining or labeling. Suitable stains are known in the art, and include Coomassie Brilliant Blue, silver stain, or fluorescent dyes such as Sypro Ruby (Molecular Probes). The inclusion of radioactively labeled amino acids or other protein precursors (e.g., ³⁵S-methionine, ³⁵S-cysteine, ¹⁴C-labelled amino acids, ¹⁵N-amino acids, ¹⁵NO₃ or ¹⁵NH₄⁺ or ¹³C-labelled amino acids) in the medium of C. glutamicum permits the labeling of proteins from these cells prior to their separation. Similarly, fluorescent labels may be employed. These labeled proteins can be extracted, isolated and separated according to the previously described techniques.

[0191] Proteins visualized by these techniques can be further analyzed by measuring the amount of dye or label used. The amount of a given protein can be determined quantitatively using, for example, optical methods and can be compared to the amount of other proteins in the same gel or in other gels. Comparisons of proteins on gels can be made, for example, by optical comparison, by spectroscopy, by image scanning and analysis of gels, or through the use of photographic films and screens. Such techniques are well-known in the art.

[0192] To determine the identity of any given protein, direct sequencing or other standard techniques may be employed. For example, N- and/or C-terminal amino acid sequencing (such as Edman degradation) may be used, as may mass spectrometry (in particular MALDI or ESI techniques (see, e.g., Langen et al. (1997) Electrophoresis 18: 1184-1192)). The protein sequences provided herein can be used for the identification of C. glutamicum proteins by these techniques.

[0193] The information obtained by these methods can be used to compare patterns of protein presence, activity, or modification between different samples from various biological conditions (e.g., different organisms, time points of fermentation, media conditions, or different biotopes, among others). Data obtained from such experiments alone, or in combination with other techniques, can be used for various applications, such as to compare the behavior of various organisms in a given (e.g., metabolic) situation, to increase the productivity of strains which produce fine chemicals or to increase the efficiency of the production of fine chemicals.

Equivalents

[0194] Those of ordinary skill in the art will recognize, or will be able to ascertain using no more than routine experimentation, many equivalents to the specific embodiments of the invention described herein. Such equivalents are intended to be encompassed by the following claims.

TABLE 1
Genes in the Application

| Nucleic | Amino | | | | | |
|---|---|---|---|---|---|---|
| Acid | Acid | | | | | |
| SEQ | SEQ | Identifi- | | | | |
| ID | ID | cation | | NT | NT | |
| NO | NO | Code | Contig. | Start | Stop | Function |
| 1 | 2 | RXA02702 | GR00758 | 1572 | 115 | UDP-N-ACETYLMURAMATE-ALANINE LIGASE (EC 6.3.2.8) |
| 3 | 4 | RXA02705 | GR00758 | 5803 | 4388 | UDP-N-ACETYLMURAMOYLALANINE-D-GLUTAMATE |
| | | | | | | LIGASE (EC 6.3.2.9) |
| 5 | 6 | RXA01254 | GR00365 | 3807 | 2539 | UDP-N-ACETYLMURAMOYLALANYL-D-GLUTAMATE-2,6- |
| | | | | | | DIAMINOPIMELATE LIGASE (EC 6.3.2.13) |
| 7 | 8 | RXN02707 | VV0017 | 20110 | 18581 | UDP-N-ACETYLMURAMOYLALANYL-D-GLUTAMYL-2,6- |
| | | | | | | DIAMINOPIMELATE-D-ALANYL-D-ALANYL LIGASE |
| 9 | 10 | F RXA02707 | GR00758 | 7264 | 6920 | UDP-N-ACETYLMURAMOYLALANYL-D-GLUTAMYL-2,6- |
| | | | | | | DIAMINOPIMELATE-D-ALANYL-D-ALANYL LIGASE (EC 6.3.2.15) |
| 11 | 12 | F RXA02708 | GR00758 | 7694 | 7260 | UDP-N-ACETYLMURAMOYLALANYL-D-GLUTAMYL-2,6- |
| | | | | | | DIAMINOPIMELATE-D-ALANYL-D- |
| | | | | | | ALANYL LIGASE (EC 6.3.2.15) |
| 13 | 14 | F RXA02709 | GR00758 | 8451 | 7723 | UDP-N-ACETYLMURAMOYLALANYL-D-GLUTAMYL- |
| | | | | | | 2,6-DIAMINOPIMELATE-D-ALANYL-D- |
| | | | | | | ALANYL LIGASE (EC 6.3.2.15) |
| 15 | 16 | RXA02710 | GR00758 | 10035 | 8473 | UDP-N-ACETYLMURAMOYLALANYL-D- |
| | | | | | | GLUTAMATE-2,6-DIAMINOPIMELATE LIGASE |
| | | | | | | (EC 6.3.2.13) |
| 17 | 18 | RXN00531 | VV0079 | 19063 | 19557 | FINE TANGLED PILI MAJOR SUBUNIT |
| 19 | 20 | RXA00944 | GR00259 | 1573 | 602 | NADPH DEHYDROGENASE 3 (EC 1.6.99.1) |
| 21 | 22 | RXS02560 | VV0101 | 9922 | 10788 | NADPH-FLAVIN OXIDOREDUCTASE (EC 1.6.99.—) |
| 23 | 24 | RXS03119 | VV0098 | 86877 | 87008 | SUPEROXIDE DISMUTASE [MN] (EC 1.15.1.1) |
| 25 | 26 | RXS03120 | VV0098 | 87351 | 87476 | SUPEROXIDE DISMUTASE [MN] (EC 1.15.1.1) |

Cell wall biosynthesis

| | | | | | | |
|---|---|---|---|---|---|---|
| 27 | 28 | RXA01430 | GR00417 | 7458 | 6271 | N-ACETYLMURAMOYL-L-ALANINE AMIDASE (EC 3.5.1.28) |
| 29 | 30 | RXA02641 | GR00749 | 5097 | 3022 | N-ACETYLMURAMOYL-L-ALANINE AMIDASE (EC 3.5.1.28) |
| 31 | 32 | RXA00135 | GR00021 | 1709 | 2962 | UDP-N-ACETYLGLUCOSAMINE 1-CARBOXYVINYLTRANSFERASE |
| | | | | | | (EC 2.5.1.7) |
| 33 | 34 | RXA02706 | GR00758 | 6910 | 5813 | PHOSPHO-N-ACETYLMURAMOYL-PENTAPEPTIDE- |
| | | | | | | TRANSFERASE (EC 2.7.8.13) |
| 35 | 36 | RXA02411 | GR00703 | 1845 | 997 | GLUTAMATE RACEMASE (EC 5.1.1.3) |
| 37 | 38 | RXN01022 | VV0143 | 4460 | 3381 | D-ALANINE-D-ALANINE LIGASE (EC 6.3.2.4) |
| 39 | 40 | F RXA01022 | GR00292 | 3 | 806 | D-ALANINE-D-ALANINE LIGASE (EC 6.3.2.4) |
| 41 | 42 | RXA02703 | GR00758 | 2698 | 1610 | UDP-N-ACETYLGLUCOSAMINE—N-ACETYLMURAMYL- |
| | | | | | | (PENTAPEPTIDE) PYROPHOSPHORYL-UNDECAPRENOL |
| | | | | | | N-ACETYLGLUCOSAMINE TRANSFERASE (EC 2.4.1.—) |
| 43 | 44 | RXA02711 | GR00758 | 12273 | 10162 | PENICILLIN-BINDING PROTEIN 2 |
| 45 | 46 | RXA02859 | GR10005 | 846 | 121 | PENICILLIN-BINDING PROTEIN 5* PRECURSOR (D-ALANYL-D- |
| | | | | | | ALANINE CARBOXYPEPTIDASE) (EC 3.4.16.4) |
| 47 | 48 | RXA00569 | GR00152 | 3928 | 4953 | PENICILLIN-BINDING PROTEIN 4 |
| 49 | 50 | RXN03092 | VV0054 | 10445 | 9561 | PENICILLIN-BINDING PROTEIN 1A |
| 51 | 52 | F RXA00594 | GR00158 | 3525 | 4457 | PENICILLIN-BINDING PROTEIN 1A |
| 53 | 54 | RXA01828 | GR00516 | 7736 | 6315 | PENICILLIN-BINDING PROTEIN 3 |
| 55 | 56 | RXA00612 | GR00162 | 3 | 1187 | PENICILLIN-BINDING PROTEIN 1A |
| 57 | 58 | RXA01510 | GR00424 | 15370 | 16650 | PENICILLIN-BINDING PROTEIN 4 PRECURSOR (PBP-4) (D-ALANYL- |
| | | | | | | D-ALANINE CARBOXYPEPTIDASE) (EC 3.4.16.4)/D-ALANYL- |
| | | | | | | D-ALANINE-ENDOPEPTIDASE (EC 3.4.99.—) |
| 59 | 60 | RXN01608 | VV0139 | 3536 | 5374 | PENICILLIN-BINDING PROTEIN 5 PRECURSOR |
| 61 | 62 | F RXA01608 | GR00449 | 837 | 2675 | (AL008883) penecillin binding protein [Mycobacterium tuberculosis] |
| 63 | 64 | RXA01270 | GR00367 | 21652 | 20498 | perosamine synthetase |
| 65 | 66 | RXN00549 | VV0079 | 31746 | 33419 | PENICILLIN-BINDING PROTEIN 1A |
| 67 | 68 | RXN00550 | VV0079 | 33457 | 33777 | PENICILLIN-BINDING PROTEIN 1A |
| 69 | 70 | RXN03091 | VV0054 | 9515 | 8970 | PENICILLIN-BINDING PROTEIN 1A |
| 71 | 72 | RXN03178 | VV0334 | 921 | 121 | PENICILLIN-BINDING PROTEIN 5* PRECURSOR (D- |
| | | | | | | ALANYL-D-ALANINE CARBOXYPEPTIDASE) (EC 3.4.16.4) |
| 73 | 74 | F RXA02859 | GR10005 | 846 | 121 | PENICILLIN-BINDING PROTEIN 5* PRECURSOR (D- |
| | | | | | | ALANYL-D-ALANINE CARBOXYPEPTIDASE) (EC 3.4.16.4) |
| 75 | 76 | RXN01267 | VV0009 | 17895 | 16582 | UDP-N-ACETYLGLUCOSAMINE 1-CARBOXYVINYLTRANSFERASE |
| | | | | | | (EC 2.5.1.7) |
| 77 | 78 | RXN00045 | VV0119 | 4409 | 5317 | UDP-N-acetylglucosamine-2-epimerase (EC 5.1.3.14)/N- |
| | | | | | | acetylmannosamine kinase (EC 2.7.1.60) |

Cell division

| | | | | | | |
|---|---|---|---|---|---|---|
| 79 | 80 | RXN02704 | VV0017 | 16043 | 14355 | CELL DIVISIN PROTEIN FTSW |
| 81 | 82 | F RXA02704 | GR00758 | 4382 | 2694 | CELL DIVISIN PROTEIN FTSW |
| 83 | 84 | RXA02722 | GR00759 | 2729 | 1404 | CELL DIVISION PROTEIN FTSZ |
| 85 | 86 | RXA00009 | GR00002 | 1545 | 646 | CELL DIVISION PROTEIN FTSX |
| 87 | 88 | RXA00010 | GR00002 | 2248 | 1562 | CELL DIVISION ATP-BINDING PROTEIN FTSE |
| 89 | 90 | RXA00143 | GR00022 | 6328 | 4847 | CELL DIVISION INHIBITOR |
| 91 | 92 | RXA00277 | GR00043 | 1588 | 5 | CELL DIVISION CONTROL PROTEIN 15 (EC 2.7.1.—) |
| 93 | 94 | RXA00857 | GR00233 | 2 | 1291 | CELL DIVISION PROTEIN FTSK |
| 95 | 96 | RXA01435 | GR00418 | 2 | 871 | CELL DIVISION CONTROL PROTEIN 15 (EC 2.7.1.—) |
| 97 | 98 | RXA01511 | GR00424 | 16655 | 17596 | CELL CYCLE PROTEIN MESJ |
| 99 | 100 | RXA01513 | GR00424 | 18368 | 20926 | CELL DIVISION PROTEIN FTSH (EC 3.4.24.—) |
| 101 | 102 | RXA02098 | GR00630 | 4161 | 5906 | CELL DIVISION PROTEIN FTSY |
| 103 | 104 | RXA02713 | GR00758 | 14077 | 13067 | Hypothetical Cell Division Protein mraW |
| 105 | 106 | RXN02723 | VV0017 | 11745 | 11080 | FTSQ |
| 107 | 108 | F RXA02723 | GR00759 | 3460 | 2984 | FTSQ |
| 109 | 110 | RXA01426 | GR00417 | 2777 | 3403 | GLUCOSE INHIBITED DIVISION PROTEIN B |
| 111 | 112 | RXA01428 | GR00417 | 4495 | 5631 | STAGE 0 SPORULATION PROTEIN J |
| 113 | 114 | RXA01640 | GR00456 | 4661 | 1344 | STAGE III SPORULATION PROTEIN E |
| 115 | 116 | RXA01829 | GR00516 | 9058 | 7736 | STAGE V SPORULATION PROTEIN E |
| 117 | 118 | RXA01427 | GR00417 | 3512 | 4432 | SOJ PROTEIN |
| 119 | 120 | RXN02973 | VV0229 | 657 | 4 | SOJ PROTEIN |
| 121 | 122 | F RXA01603 | GR00447 | 14043 | 14663 | SOJ PROTEIN |
| 123 | 124 | RXN00818 | VV0054 | 28524 | 27685 | INHIBITION OF MORPHOLOGICAL DIFFERENTIATION |

Proteolysis

| | | | | | | |
|---|---|---|---|---|---|---|
| 125 | 126 | RXN03028 | VV0008 | 41156 | 43930 | ATP-DEPENDENT CLP PROTEASE ATP-BINDING SUBUNIT CLPA |
| 127 | 128 | F RXA02470 | GR00715 | 2216 | 3196 | ATP-DEPENDENT CLP PROTEASE ATP-BINDING SUBUNIT CLPA |
| 129 | 130 | F RXA02471 | GR00715 | 3159 | 4991 | ATP-DEPENDENT CLP PROTEASE ATP-BINDING SUBUNIT CLPA |
| 131 | 132 | RXN03094 | VV0057 | 1794 | 43 | CLPB PROTEIN |
| 133 | 134 | F RXA01668 | GR00464 | 2205 | 3920 | CLPB PROTEIN |
| 135 | 136 | RXN02937 | VV0098 | 85783 | 85382 | N-ACYL-L-AMINO ACID AMIDOHYDROLASE (EC 3.5.1.14) |
| 137 | 138 | RXN03077 | VV0043 | 1729 | 2913 | N-ACYL-L-AMINO ACID AMIDOHYDROLASE (EC 3.5.1.14) |
| 139 | 140 | F RXA02855 | GR10002 | 1693 | 2877 | N-ACYL-L-AMINO ACID AMIDOHYDROLASE (EC 3.5.1.14), |
| | | | | | | hippurate hydrolase |
| 141 | 142 | RXN00982 | VV0149 | 7596 | 6091 | (L42758) proteinase [Streptomyces lividans] |
| 143 | 144 | F RXA00977 | GR00275 | 1647 | 2660 | (L42758) proteinase [Streptomyces lividans] |
| 145 | 146 | F RXA00982 | GR00276 | 5194 | 4949 | (L42758) proteinase [Streptomyces lividans] |
| 147 | 148 | RXN01181 | VV0065 | 1 | 957 | AMINOPEPTIDASE A/I (EC 3.4.11.1) |
| 149 | 150 | F RXA01181 | GR00337 | 1 | 957 | AMINOPEPTIDASE |
| 151 | 152 | RXN01014 | VV0209 | 13328 | 10728 | AMINOPEPTIDASE N (EC 3.4.11.2) |
| 153 | 154 | F RXA01014 | GR00289 | 3 | 1580 | AMINOPEPTIDASE N (EC 3.4.11.2) |
| 155 | 156 | F RXA01018 | GR00290 | 2289 | 3152 | AMINOPEPTIDASE N (EC 3.4.11.2) |
| 157 | 158 | RXN01046 | VV0015 | 47863 | 49641 | ATP-DEPENDENT CLP PROTEASE ATP-BINDING SUBUNIT CLPA |
| 159 | 160 | RXN01974 | VV0218 | 3793 | 5577 | ATP-DEPENDENT CLP PROTEASE ATP-BINDING SUBUNIT CLPA |
| 161 | 162 | RXN01120 | VV0182 | 5678 | 4401 | ATP-DEPENDENT CLP PROTEASE ATP-BINDING SUBUNIT CLPX |
| 163 | 164 | F RXA01120 | GR00310 | 2349 | 1072 | ATP-DEPENDENT CLP PROTEASE ATP-BINDING SUBUNIT CLPX |
| 165 | 166 | RXN00397 | VV0025 | 3803 | 4603 | XAA-PRO AMINOPEPTIDASE (EC 3.4.11.9) |
| 167 | 168 | RXN01868 | VV0127 | 9980 | 11905 | ZINC METALLOPROTEASE (EC 3.4.24.—) |
| 169 | 170 | F RXA01868 | GR00534 | 1640 | 30 | ZINC METALLOPROTEASE (EC 3.4.24.—) |
| 171 | 172 | F RXA01869 | GR00534 | 1954 | 1652 | ZINC METALLOPROTEASE (EC 3.4.24.—) |
| 173 | 174 | RXN00499 | VV0086 | 8158 | 9438 | PROLINE IMINOPEPTIDASE (EC 3.4.11.5) |
| 175 | 176 | F RXA00499 | GR00125 | 3 | 959 | PROLINE IMINOPEPTIDASE |
| 177 | 178 | RXN01277 | VV0009 | 32155 | 34158 | PROLYL ENDOPEPTIDASE (EC 3.4.21.26) |
| 179 | 180 | F RXA01277 | GR00368 | 1738 | 50 | PROLYL ENDOPEPTIDASE (EC 3.4.21.26) |
| 181 | 182 | RXN00675 | VV0005 | 33258 | 34049 | METHIONINE AMINOPEPTIDASE (EC 3.4.11.18) |
| 183 | 184 | F RXA00675 | GR00178 | 2 | 484 | METHIONINE AMINOPEPTIDASE (EC 3.4.11.18) |
| 185 | 186 | RXN00877 | VV0099 | 2221 | 3885 | PEPTIDYL-DIPEPTIDASE DCP (EC 3.4.15.5) |
| 187 | 188 | F RXA00877 | GR00242 | 3 | 1067 | PEPTIDYL-DIPEPTIDASE DCP (EC 3.4.15.5) |
| 189 | 190 | RXN01226 | VV0064 | 4172 | 4711 | PEPTIDYL-TRNA HYDROLASE (EC 3.1.1.29) |
| 191 | 192 | RXN01963 | VV0200 | 689 | 6 | Hypothetical Secretory Serine Protease (EC 3.4.21.—) |
| 193 | 194 | RXN00621 | VV0135 | 5853 | 5071 | PROTEASE II (EC 3.4.21.83) |
| 195 | 196 | F RXA00621 | GR00163 | 4075 | 4857 | PTRB periplasmic protease |
| 197 | 198 | RXN00622 | VV0135 | 5150 | 3735 | PROTEASE II (EC 3.4.21.83) |
| 199 | 200 | F RXA00622 | GR00163 | 4778 | 6193 | PTRB periplasmic protease |
| 201 | 202 | RXN02146 | VV0300 | 14742 | 15368 | PROTEIN P60 PRECURSOR |
| 203 | 204 | RXN03133 | VV0127 | 39393 | 40076 | HYDROGENASE 1 MATURATION PROTEASE (EC 3.4.—.—) |
| 205 | 206 | RXN02820 | VV0131 | 4799 | 6109 | GAMMA-GLUTAMYLTRANSPEPTIDASE (EC 2.3.2.2) |
| 207 | 208 | F RXA02820 | GR00801 | 1 | 507 | GAMMA-GLUTAMYLTRANSPEPTIDASE (EC 2.3.2.2) |
| 209 | 210 | F RXA02000 | GR00589 | 3430 | 3933 | GAMMA-GLUTAMYLTRANSPEPTIDASE (EC 2.3.2.2) |
| 211 | 212 | RXN02944 | VV0169 | 12751 | 12074 | GAMMA-GLUTAMYLTRANSPEPTIDASE PRECURSOR (EC 2.3.2.2) |
| 213 | 214 | RXS00197 | VV0115 | 2733 | 1522 | Membrane Spanning Protease |
| 215 | 216 | RXS01223 | VV0064 | 7528 | 8139 | PEPTIDYL-TRNA HYDROLASE (EC 3.1.1.29) |
| 217 | 218 | RXS01642 | VV0005 | 49423 | 48182 | Serine protease |

Enzymes in general

| | | | | | | |
|---|---|---|---|---|---|---|
| 219 | 220 | RXA01728 | GR00489 | 2452 | 1478 | BETA C-S LYASE (EC 3.—.—.—) PUTATIVE AMINOTRANSFERASE |
| 221 | 222 | RXA02214 | GR00650 | 954 | 1562 | Acetyltransferases |
| 223 | 224 | RXA02716 | GR00758 | 16827 | 17387 | Acetyltransferases |
| 225 | 226 | RXN01499 | VV0008 | 7034 | 3213 | ENTEROBACTIN SYNTHETASE COMPONENT F |
| 227 | 228 | FRXA01499 | GR00424 | 7034 | 3213 | Acetyltransferases (the isoleucine patch superfamily) |
| 229 | 230 | RXN00787 | VV0321 | 3736 | 5637 | D-AMINO ACID DEHYDROGENASE LARGE SUBUNIT (EC 1.4.99.1) |
| 231 | 232 | F RXA00787 | GR00209 | 598 | 5 | D-AMINO ACID DEHYDROGENASE LARGE SUBUNIT (EC 1.4.99.1) |
| 233 | 234 | F RXA00791 | GR00210 | 831 | 4 | D-AMINO ACID DEHYDROGENASE LARGE SUBUNIT (EC 1.4.99.1) |
| 235 | 236 | RXA01057 | GR00296 | 7548 | 6046 | D-AMINO ACID DEHYDROGENASE LARGE SUBUNIT (EC 1.4.99.1) |
| 237 | 238 | RXA01055 | GR00296 | 4821 | 4720 | D-AMINO ACID DEHYDROGENASE SMALL SUBUNIT (EC 1.4.99.1) |
| 239 | 240 | RXA01056 | GR00296 | 5952 | 5053 | D-AMINO ACID DEHYDROGENASE SMALL SUBUNIT (EC 1.4.99.1) |
| 241 | 242 | RXN02021 | VV0160 | 2008 | 1061 | 2,3,4,5-tetrahydropyridine-2-carboxylate N-succinyltransferase (EC 2.3.1.117) |
| 243 | 244 | RXS00949 | | | | quinate dehydrogenase (pyrroloquinoline-quinone) (EC 1.1.99.25) |
| 245 | 246 | RXS00004 | VV0196 | 6930 | 6460 | NITRILASE REGULATOR |
| 247 | 248 | RXS00166 | VV0232 | 3650 | 4309 | Methyltransferase |
| 249 | 250 | RXS00288 | VV0079 | 14586 | 15596 | QUINONE OXIDOREDUCTASE (EC 1.6.5.5) |
| 251 | 252 | RXS01114 | VV0182 | 9118 | 10341 | 3-KETOACYL-COA THIOLASE (EC 2.3.1.16) |
| 253 | 254 | RXS01205 | VV0268 | 893 | 363 | UNDECAPRENYL-PHOSPHATE ALPHA-N- |
| | | | | | | ACETYLGLUCOSAMINYLTRANSFERASE (EC 2.4.1.—) |
| 255 | 256 | RXS01269 | VV0009 | 21430 | 20990 | UNDECAPRENYL-PHOSPHATE |
| | | | | | | GALACTOSEPHOSPHOTRANSFERASE (EC 2.7.8.6) |
| 257 | 258 | RXS01421 | VV0122 | 16024 | 15638 | ACYLTRANSFERASE (EC 2.3.1.—) |
| 259 | 260 | RXS01491 | VV0139 | 36800 | 37450 | DNA FOR L-PROLINE 3-HYDROXYLASE, COMPLETE CDS |
| 261 | 262 | RXS01572 | VV0009 | 43945 | 44436 | ALCOHOL DEHYDROGENASE (EC 1.1.1.1) |
| 263 | 264 | RXS02453 | VV0107 | 7370 | 8122 | ACETOIN(DIACETYL) REDUCTASE (EC 1.1.1.5) |
| 265 | 266 | RXS02474 | VV0008 | 47021 | 46248 | (S,S)-butane-2,3-diol dehydrogenase (EC 1.1.1.76) |
| 267 | 268 | RXS02485 | VV0007 | 2359 | 3459 | UDP-N-ACETYLENOLPYRUVOYLGLUCOSAMINE REDUCTASE |
| | | | | | | (EC 1.1.1.158) |
| 269 | 270 | RXS02539 | VV0057 | 17332 | 15815 | ALDEHYDE DEHYDROGENASE (EC 1.2.1.3) |
| 271 | 272 | RXS02578 | VV0098 | 7668 | 6565 | ACYLTRANSFERASE |
| 273 | 274 | RXS02741 | VV0074 | 5768 | 6733 | QUINONE OXIDOREDUCTASE (EC 1.6.5.5) |
| 275 | 276 | RXS03061 | VV0034 | 108 | 437 | ALDEHYDE DEHYDROGENASE (EC 1.2.1.3) |
| 277 | 278 | RXS03150 | VV0155 | 10678 | 10055 | ALDEHYDE DEHYDROGENASE (EC 1.2.1.3) |
| 279 | 280 | RXS02554 | | | | Oxidoreductase (EC 1.1.1.—) |
| 281 | 282 | RXS03058 | | | | METHYLTRANSFERASE (EC 2.1.1.—) |
| 283 | 284 | RXS03218 | | | | CAFFEOYL-COA O-METHYLTRANSFERASE (EC 2.1.1.104) |
| 285 | 286 | F RXA01918 | GR00549 | 4644 | 5057 | CAFFEOYL-COA O-METHYLTRANSFERASE (EC 2.1.1.104) |
| 287 | 288 | RXC00110 | VV0054 | 27517 | 26969 | Protein involved in hydrolysis of epoxides |
| 289 | 290 | RXC01971 | VV0105 | 4545 | 3715 | Metal-Dependent Hydrolase |

Genes encoding enzymes for the metabolism of inorganic compounds
Phosphate and Phosphonate metabolism

| | | | | | | |
|---|---|---|---|---|---|---|
| 291 | 292 | RXA02118 | GR00636 | 2124 | 1783 | PHNA PROTEIN |
| 293 | 294 | RXA00078 | GR00012 | 6375 | 5962 | PHNB PROTEIN |
| 295 | 296 | RXA02105 | GR00632 | 294 | 4 | PHNB PROTEIN |
| 297 | 298 | RXN00663 | VV0142 | 10120 | 11493 | PHOH PROTEIN HOMOLOG |
| 299 | 300 | F RXA00663 | GR00173 | 1222 | 227 | PHOH PROTEIN HOMOLOG |
| 301 | 302 | RXA00888 | GR00242 | 14325 | 15341 | PHOH PROTEIN HOMOLOG |
| 303 | 304 | RXA01437 | GR00418 | 3932 | 2550 | PHOSPHATE ACETYLTRANSFERASE (EC 2.3.1.8) |
| 305 | 306 | RXN00778 | VV0103 | 18126 | 19250 | PHOSPHATE-BINDING PERIPLASMIC PROTEIN PRECURSOR |
| 307 | 308 | F RXA00778 | GR00205 | 9079 | 8246 | PHOSPHATE-BINDING PERIPLASMIC PROTEIN PRECURSOR |
| 309 | 310 | RXA02497 | GR00720 | 10059 | 10985 | EXOPOLYPHOSPHATASE (EC 3.6.1.11) |
| 311 | 312 | RXA01477 | GR00422 | 8469 | 10016 | ALKALINE PHOSPHATASE D PRECURSOR (EC 3.1.3.1) |
| 313 | 314 | RXA01509 | GR00424 | 15169 | 14696 | INORGANIC PYROPHOSPHATASE (EC 3.6.1.1) |
| 315 | 316 | RXA00100 | GR00014 | 9512 | 10111 | DEDA PROTEIN, similar to alkaline phosphatase |
| 317 | 318 | RXA00615 | GR00162 | 3355 | 2774 | DEDA PROTEIN |
| 319 | 320 | RXN00250 | VV0189 | 286 | 1032 | DEDA PROTEIN - ALKALINE PHOSPHATASE LIKE PROTEIN |
| 321 | 322 | F RXA02010 | GR00602 | 79 | 525 | DEDA PROTEIN |
| 323 | 324 | RXA02120 | GR00636 | 5021 | 4260 | CARBOXYVINYL-CARBOXYPHOSPHONATE PHOSPHORYLMUTASE |
| | | | | | | (EC 2.7.8.23) |
| 325 | 326 | RXS01000 | VV0106 | 7252 | 6407 | PHOSPHONATES TRANSPORT SYSTEM PERMEASE PROTEIN PHNE |
| 327 | 328 | RXS01002 | VV0106 | 8858 | 8055 | PHOSPHONATES TRANSPORT ATP-BINDING PROTEIN PHNC |
| 329 | 330 | RXS01003 | VV0106 | 8055 | 7252 | PHOSPHONATES TRANSPORT SYSTEM PERMEASE PROTEIN PHNE |
| 331 | 332 | RXS01902 | VV0098 | 84095 | 83037 | alkaline phosphatase |

Fe-Metabolism

| | | | | | | |
|---|---|---|---|---|---|---|
| 333 | 334 | RXA01967 | GR00567 | 1848 | 706 | FERRIC ENTEROCHELIN ESTERASE HOMOLOG |
| 335 | 336 | RXA00070 | GR00011 | 3436 | 3867 | FERRIC UPTAKE REGULATION PROTEIN |
| 337 | 338 | RXA01934 | GR00555 | 7192 | 7749 | FERRIPYOCHELIN BINDING PROTEIN |
| 339 | 340 | RXN01997 | VV0084 | 33308 | 33793 | FERRITIN |
| 341 | 342 | F RXA01997 | GR00586 | 546 | 935 | FERRITIN |
| 343 | 344 | RXA01082 | GR00302 | 1486 | 827 | IRON REPRESSOR |
| 345 | 346 | RXA01236 | GR00358 | 2185 | 1241 | IRON(III) DICITRATE-BINDING PERIPLASMIC PROTEIN PRECURSOR |
| 347 | 348 | RXA01354 | GR00393 | 2692 | 1757 | IRON(III) DICITRATE-BINDING PERIPLASMIC PROTEIN PRECURSOR |
| 349 | 350 | RXA01620 | GR00451 | 2585 | 3532 | IRON(III) DICITRATE-BINDING PERIPLASMIC PROTEIN PRECURSOR |
| 351 | 352 | RXA02052 | GR00624 | 4586 | 3795 | IRON(III) DICITRATE-BINDING PERIPLASMIC PROTEIN PRECURSOR |
| 353 | 354 | RXA00372 | GR00078 | 1653 | 2729 | PERIPLASMIC-IRON-BINDING PROTEIN SHIB |
| 355 | 356 | RXA00088 | GR00013 | 4389 | 5402 | FERRIC ANGUIBACTIN-BINDING PROTEIN PRECURSOR |
| 357 | 358 | RXS00156 | VV0167 | 1342 | 2451 | FERROCHELATASE (EC 4.99.1.1) |
| 359 | 360 | RXS00624 | VV0135 | 2018 | 1332 | FERROCHELATASE (EC 4.99.1.1) |

Modification and degradation of aromatic compounds

| | | | | | | |
|---|---|---|---|---|---|---|
| 361 | 362 | RXA00024 | GR00003 | 938 | 1882 | ARYL-ALCOHOL DEHYDROGENASE (NADP+) (EC 1.1.1.91) |
| 363 | 364 | RXA02526 | GR00725 | 4109 | 5314 | 3-CARBOXY-CIS,CIS-MUCONATE CYCLOISOMERASE (EC 5.5.1.2) |
| 365 | 366 | RXN02813 | VV0128 | 13120 | 14118 | 3-CARBOXY-CIS,CIS-MUCONATE CYCLOISOMERASE |
| | | | | | | HOMOLOG (EC 5.5.1.2) |
| 367 | 368 | F RXA02813 | GR00794 | 651 | 10 | 3-CARBOXY-CIS,CIS-MUCONATE CYCLOISOMERASE HOMOLOG |
| | | | | | | (EC 5.5.1.2) |
| 369 | 370 | RXA01113 | GR00307 | 1098 | 862 | 4-CARBOXYMUCONOLACTONE DECARBOXYLASE (EC 4.1.1.44) |
| 371 | 372 | RXA02126 | GR00637 | 1556 | 1876 | 4-CARBOXYMUCONOLACTONE DECARBOXYLASE (EC 4.1.1.44) |
| 373 | 374 | RXA01465 | GR00421 | 4121 | 2961 | MUCONATE CYCLOISOMERASE (EC 5.5.1.1) |
| 375 | 376 | RXA02316 | GR00665 | 9038 | 8025 | MUCONATE CYCLOISOMERASE (EC 5.5.1.1) |
| 377 | 378 | RXA01464 | GR00421 | 2945 | 2655 | MUCONOLACTONE ISOMERASE (EC 5.3.3.4) |
| 379 | 380 | RXA02603 | GR00742 | 7742 | 8737 | 4-HYDROXYBENZOATE OCTAPRENYLTRANSFERASE (EC 2.5.1.—) |
| 381 | 382 | RXN02839 | VV0362 | 3 | 449 | 4-HYDROXYBENZOATE OCTAPRENYLTRANSFERASE (EC 2.5.1.—) |
| 383 | 384 | F RXA02839 | GR00832 | 3 | 419 | 4-HYDROXYBENZOATE OCTAPRENYLTRANSFERASE (EC 2.5.1.—) |
| 385 | 386 | RXA01502 | GR00424 | 8385 | 9617 | BENZENE 1,2-DIOXYGENASE SYSTEM FERREDOXIN-NAD(+) |
| | | | | | | REDUCTASE COMPONENT (EC 1.18.1.3) |
| 387 | 388 | RXA02828 | GR00813 | 15 | 572 | BIPHENYL-2,3-DIOL 1,2-DIOXYGENASE III (EC 1.13.11.39) |
| 389 | 390 | RXA02064 | GR00626 | 5223 | 4585 | CAFFEOYL-COA O-METHYLTRANSFERASE (EC 2.1.1.104) |
| 391 | 392 | RXN00639 | VV0128 | 7858 | 8712 | CATECHOL 1,2-DIOXYGENASE (EC 1.13.11.1) |
| 393 | 394 | F RXA00639 | GR00168 | 665 | 6 | CATECHOL 1,2-DIOXYGENASE (EC 1.13.11.1) |
| 395 | 396 | RXN01653 | VV0321 | 12867 | 11407 | DIBENZOTHIOPHENE DESULFURIZATION ENZYME A |
| 397 | 398 | F RXA00797 | GR00212 | 445 | 804 | DIBENZOTHIOPHENE DESULFURIZATION ENZYME A |
| 399 | 400 | F RXA01653 | GR00458 | 1909 | 971 | DIBENZOTHIOPHENE DESULFURIZATION ENZYME A |
| 401 | 402 | RXN02530 | VV0057 | 5469 | 6125 | DIMETHYLANILINE MONOOXYGENASE (N-OXIDE FORMING) 1 |
| | | | | | | (EC 1.14.13.8) |
| 403 | 404 | F RXA02530 | GR00726 | 20 | 469 | DIMETHYLANILINE MONOOXYGENASE (N-OXIDE FORMING) |
| | | | | | | 1 (EC 1.14.13.8) |
| 405 | 406 | RXA02083 | GR00629 | 1720 | 311 | DIMETHYLANILINE MONOOXYGENASE (N-OXIDE FORMING) |
| | | | | | | 2 (EC 1.14.13.8) |
| 407 | 408 | RXA00892 | GR00243 | 2188 | 1295 | PARANITROBENZYL ESTERASE (EC 3.1.1.—) |
| 409 | 410 | RXA02092 | GR00629 | 12153 | 10516 | PARANITROBENZYL ESTERASE (EC 3.1.1.—) |
| 411 | 412 | RXN00658 | VV0083 | 15705 | 16397 | PHENOL 2-MONOOXYGENASE (EC 1.14.13.7) |
| 413 | 414 | F RXA00658 | GR00170 | 321 | 4 | PHENOL 2 MONOOXYGENASE (EC 1.14.13.7) |
| 415 | 416 | RXA01385 | GR00406 | 5320 | 3440 | PHENOL 2 MONOOXYGENASE (EC 1.14.13.7) |
| 417 | 418 | RXN01461 | VV0128 | 12414 | 13025 | PROTOCATECHUATE 3,4-DIOXYGENASE ALPHA CHAIN (EC 1.13.11.3) |
| 419 | 420 | F RXA01461 | GR00421 | 463 | 5 | PROTOCATECHUATE 3,4-DIOXYGENASE ALPHA CHAIN (EC 1.13.11.3) |
| 421 | 422 | RXA01462 | GR00421 | 1167 | 478 | PROTOCATECHUATE 3,4-DIOXYGENASE BETA CHAIN (EC 1.13.11.3) |
| 423 | 424 | RXN00641 | VV0128 | 7440 | 5950 | TOLUATE 1,2-DIOXYGENASE ALPHA SUBUNIT (EC 1.14.12.—) |
| 425 | 426 | F RXA00640 | GR00168 | 1083 | 1331 | TOLUATE 1,2-DIOXYGENASE ALPHA SUBUNIT (EC 1.14.12.—) |
| 427 | 428 | F RXA00641 | GR00168 | 1533 | 2573 | TOLUATE 1,2-DIOXYGENASE ALPHA SUBUNIT (EC 1.14.12.—) |
| 429 | 430 | RXA00642 | GR00168 | 2616 | 3107 | TOLUATE 1,2-DIOXYGENASE BETA SUBUNIT (EC 1.14.12.—) |
| 431 | 432 | RXA00643 | GR00168 | 3122 | 4657 | TOLUATE 1,2-DIOXYGENASE ELECTRON TRANSFER COMPONENT |
| 433 | 434 | RXN01993 | VV0182 | 16 | 1143 | VANILLATE DEMETHYLASE (EC 1.14.—.—) |
| 435 | 436 | F RXA01993 | GR00584 | 1 | 366 | VANILLATE DEMETHYLASE (EC 1.14.—.—) |
| 437 | 438 | F RXA02012 | GR00604 | 2 | 670 | VANILLATE DEMETHYLASE (EC 1.14.—.—) |
| 439 | 440 | RXA01994 | GR00584 | 373 | 1347 | VANILLATE DEMETHYLASE OXIDOREDUCTASE (EC 1.—.—.—) |
| 441 | 442 | RXA02535 | GR00726 | 6599 | 7753 | XYLENE MONOOXYGENASE ELECTRON TRANSFER COMPONENT |
| 443 | 444 | RXA00964 | GR00269 | 1575 | 451 | 1-hydroxy-2-naphthoate 1,2-dioxygenase (EC 1.13.11.38) |
| 445 | 446 | RXN01466 | VV0019 | 7050 | 6091 | ARYLESTERASE (EC 3.1.1.2) |
| 447 | 448 | F RXA01466 | GR00422 | 826 | 5 | ARYLESTERASE (EC 3.1.1.2) |
| 449 | 450 | RXN03036 | VV0014 | 671 | 6 | PROTOCATECHUATE 3,4-DIOXYGENASE BETA CHAIN (EC 1.13.11.3) |
| 451 | 452 | F RXA02895 | GR10037 | 671 | 6 | CHLOROCATECHOL 1,2-DIOXYGENASE (EC 1.13.11.1) |
| 453 | 454 | RXA02449 | GR00710 | 1458 | 2360 | hydroxyquinol 1,2-dioxygenase (EC 1.13.11.37) |
| 455 | 456 | RXN00178 | VV0174 | 14670 | 15554 | hydroxyquinol 1,2-dioxygenase (EC 1.13.11.37) |
| 457 | 458 | F RXA00178 | GR00028 | 304 | 1188 | HYDROXYQUINOL-1,2-DIOXYGENASE |
| 459 | 460 | RXA02111 | GR00632 | 4310 | 5593 | QUINOLINATE SYNTHETASE A |
| 461 | 462 | RXA00644 | | GR00168 | 4657 | CIS-1,2-DIHYDROXYCYCLOHEXA-3,5-DIENE-1-CARBOXYLATE |
| | | | | | | DEHYDROGENASE (EC 1.3.1.55) |
| 463 | 464 | RXN00177 | VV0174 | 13589 | 14656 | MALEYLACETATE REDUCTASE (EC 1.3.1.32) |
| 465 | 466 | F RXA00177 | GR00028 | 3 | 290 | MALEYLACETATE REDUCTASE (EC 1.3.1.32) metabolism of 2,4,5- |
| | | | | | | trichlorophenoxyacetic acid |
| 467 | 468 | RXA02448 | GR00710 | 340 | 1428 | MALEYLACETATE REDUCTASE (EC 1.3.1.32) |
| 469 | 470 | RXA00048 | GR00008 | 2185 | 527 | 3-(3-HYDROXYPHENYL) PROPIONATE HYDROXYLASE |
| 471 | 472 | RXA01126 | GR00313 | 2 | 565 | POSSIBLE 2-HYDROXYHEPTA-2,4-DIENE-1,7-DIOATE ISOMAERASE |
| 473 | 474 | RXA01117 | GR00309 | 1713 | 973 | SUCCINYL-COA:3-KETOACID-COENZYME A TRANSFERASE |
| | | | | | | PRECURSOR (EC 2.8.3.5) |
| 475 | 476 | RXA00772 | GR00205 | 2715 | 1210 | SUCCINYL-COA:COENZYME A TRANSFERASE (EC 2.8.3.—) |
| 477 | 478 | RXA01288 | GR00372 | 2018 | 1644 | SUCCINYL-COA:COENZYME A TRANSFERASE (EC 2.8.3.—) |

[0195] TABLE 2
GENES IDENTIFIED FROM GENBANK

| GenBank ™ | | | |
|---|---|---|---|
| Accession | | | |
| No. | Gene Name | Gene Function | Reference |
| A09073 | ppg | Phosphoenol pyruvate carboxylase | Bachmann, B. et al. “DNA fragment coding for phosphoenolpyruvat |
| | | | corboxylase, recombinant DNA carrying said fragment, strains carrying the |
| | | | recombinant DNA and method for producing L-aminino acids using said |
| | | | strains,” Patent: EP 0358940-A 3 Mar. 21, 1990 |
| A45579, | | Threonine dehydratase | Moeckel, B. et al. “Production of L-isoleucine by means of recombinant |
| A45581, | | | micro-organisms with deregulated threonine dehydratase,” Patent: WO |
| A45583, | | | 9519442-A 5 Jul. 20, 1995 |
| A45585 | | | |
| A45587 | | | |
| AB003132 | murC; ftsQ; | | Kobayashi, M. et al. “Cloning, sequencing, and characterization of the ftsZ |
| | ftsZ | | gene from coryneform bacteria,” Biochem. Biophys. Res. Commun., |
| | | | 236(2): 383-388 (1997) |
| AB015023 | murC; ftsQ | | Wachi, M. et al. “A murC gene from coryneform bacteria,” Appl. Microbiol. |
| | | | Biotechnol., 51(2): 223-228 (1999) |
| AB018530 | dtsR | | Kimura, E. et al. “Molecular cloning of a novel gene, dtsR, which rescues the |
| | | | detergent sensitivity of a mutant derived from Brevibacterium |
| | | | lactofermentum,” Biosci. Biotechnol. Biochem., 60(10): 1565-1570 (1996) |
| AB018531 | dtsR1; dtsR2 | | |
| AB020624 | murI | D-glutamate racemase | |
| AB023377 | tkt | transketolase | |
| AB024708 | gltB; gltD | Glutamine 2-oxoglutarate | |
| | | aminotransferase | |
| | | large and small subunits | |
| AB025424 | acn | aconitase | |
| AB027714 | rep | Replication protein | |
| AB027715 | rep; aad | Replication protein; aminoglycoside | |
| | | adenyltransferase | |
| AF005242 | argC | N-acetylglutamate-5-semialdehyde | |
| | | dehydrogenase | |
| AF005635 | glnA | Glutamine synthetase | |
| AF030405 | hisF | cyclase | |
| AF030520 | argG | Argininosuccinate synthetase | |
| AF031518 | argF | Ornithine carbamolytransferase | |
| AF036932 | aroD | 3-dehydroquinate dehydratase | |
| AF038548 | pyc | Pyruvate carboxylase | |
| AF038651 | dciAE; apt; | Dipeptide-binding protein; adenine | Wehmeier, L. et al. “The role of the Corynebacterium glutamicum rel gene in |
| | rel | phosphoribosyltransferase; GTP | (p)ppGpp metabolism,” Microbiology, 144: 1853-1862 (1998) |
| | | pyrophosphokinase | |
| AF041436 | argR | Arginine repressor | |
| AF045998 | impA | Inositol monophosphate phosphatase | |
| AF048764 | argH | Argininosuccinate lyase | |
| AF049897 | argC; argJ; | N-acetylglutamylphosphate reductase; | |
| | argB; argD; | ornithine acetyltransferase; N- | |
| | argF; argR; | acetylglutamate kinase; acetylornithine | |
| | argG; argH | transminase; ornithine | |
| | | carbamoyltransferase; arginine repressor; | |
| | | argininosuccinate synthase; | |
| | | argininosuccinate lyase | |
| AF050109 | inhA | Enoyl-acyl carrier protein reductase | |
| AF050166 | hisG | ATP phosphoribosyltransferase | |
| AF051846 | hisA | Phosphoribosylformimino-5-amino-1- | |
| | | phosphoribosyl-4-imidazolecarboxamide | |
| | | isomerase | |
| AF052652 | metA | Homoserine O-acetyltransferase | Park, S. et al. “Isolation and analysis of metA, a methionine biosynthetic gene |
| | | | encoding homoserine acetyltransferase in Corynebacterium glutamicum,” Mol. |
| | | | Cells., 8(3): 286-294 (1998) |
| AF053071 | aroB | Dehydroquinate synthetase | |
| AF060558 | hisH | Glutamine amidotransferase | |
| AF086704 | hisE | Phosphoribosyl-ATP- | |
| | | pyrophosphohydrolase | |
| AF114233 | aroA | 5-enolpyruvylshikimate 3-phosphate | |
| | | synthase | |
| AF116184 | panD | L-aspartate-alpha-decarboxylase precursor | Dusch, N. et al. “Expression of the Corynebacterium glutamicum panD gene |
| | | | encoding L-aspartate-alpha-decarboxylase leads to pantothenate |
| | | | overproduction in Escherichia coli,” |
| | | | Appl. Environ. Microbiol., 65(4)1530-1539 |
| | | | (1999) |
| AF124518 | aroD; aroE | 3-dehydroquinase; shikimate | |
| | | dehydrogenase | |
| AF124600 | aroC; aroK; | Chorismate synthase; shikimate kinase; 3- | |
| | aroB; pepQ | dehydroquinate synthase; putative | |
| | | cytoplasmic peptidase | |
| AF145897 | inhA | | |
| AF145898 | inhA | | |
| AJ001436 | ectP | Transport of ectoine, glycine betaine, | Peter, H. et al. “Corynebacterium glutamicum is equipped with four secondary |
| | | proline | carriers for compatible solutes: Identification, sequencing, and characterization |
| | | | of the proline/ectoine uptake system, ProP, and the ectoine/proline/glycine |
| | | | betaine carrier, EctP,” J. Bacteriol., 180(22): 6005-6012 (1998) |
| AJ004934 | dapD | Tetrahydrodipicolinate succinylase | Wehrmann, A. et al. “Different modes of diaminopimelate synthesis and their |
| | | (incompleteⁱ) | role in cell wall integrity: |
| | | | A study with Corynebacterium glutamicum,” J. Bacteriol., |
| | | | 180(12): 3159-3165 (1998) |
| AJ007732 | ppc; secG; | Phosphoenolpyruvate-carboxylase; ?; high | |
| | amt; ocd; | affinity ammonium uptake protein; | |
| | soxA | putative ornithine-cyclodecarboxylase; | |
| | | sarcosine oxidase | |
| AJ010319 | ftsY, glnB, | Involved in cell division; PII protein; | Jakoby, M. et al. “Nitrogen regulation in Corynebacterium glutamicum; |
| | glnD; srp; | uridylyltransferase (uridylyl-removing | Isolation of genes involved in biochemical characterization of corresponding |
| | amtP | enzmye); signal recognition particle; low | proteins,” FEMS Microbiol., 173(2): 303-310 (1999) |
| | | affinity ammonium uptake protein | |
| AJ132968 | cat | Chloramphenicol aceteyl transferase | |
| AJ224946 | mqo | L-malate: quinone oxidoreductase | Molenaar, D. et al. “Biochemical and genetic characterization of the |
| | | | membrane-associated malate dehydrogenase (acceptor) from Corynebacterium |
| | | | glutamicum,” Eur. J. Biochem., 254(2): 395-403 (1998) |
| AJ238250 | ndh | NADH dehydrogenase | |
| AJ238703 | porA | Porin | Lichtinger, T. et al. “Biochemical and biophysical characterization of the cell |
| | | | wall porin of Corynebacterium glutamicum: The channel is formed by a low |
| | | | molecular mass polypeptide,” Biochemistry, 37(43): 15024-15032 (1998) |
| D17429 | | Transposable element IS31831 | Vertes, A. A. et al. “Isolation and characterization of IS31831, a transposable |
| | | | element from Corynebacterium glutamicum,” Mol. Microbiol., 11(4): 739-746 |
| | | | (1994) |
| D84102 | odhA | 2-oxoglutarate dehydrogenase | Usuda, Y. et al. “Molecular cloning of the Corynebacterium glutamicum |
| | | | (Brevibacterium lactofermentum AJ12036) odhA gene encoding a novel type |
| | | | of 2-oxoglutarate dehydrogenase,” Microbiology, 142: 3347-3354 (1996) |
| E01358 | hdh; hk | Homoserine dehydrogenase; homoserine | Katsumata, R. et al. “Production of L-thereonine and L-isoleucine,” Patent: JP |
| | | kinase | 1987232392-A 1 Oct. 12, 1987 |
| E01359 | | Upstream of the start codon of homoserine | Katsumata, R. et al. “Production of L-thereonine and L-isoleucine,” Patent: JP |
| | | kinase gene | 1987232392-A 2 Oct. 12, 1987 |
| E01375 | | Tryptophan operon | |
| E01376 | trpL; trpE | Leader peptide; anthranilate synthase | Matsui, K. et al. “Tryptophan operon, peptide and protein coded thereby, |
| | | | utilization of tryptophan operon gene expression and production of |
| | | | tryptophan,” Patent: JP 1987244382-A 1 Oct. 24, 1987 |
| E01377 | | Promoter and operator regions of | Matsui, K. et al. “Tryptophan operon, peptide and protein coded thereby, |
| | | tryptophan operon | utilization of tryptophan operon gene expression and production of |
| | | | tryptophan,” Patent: JP 1987244382-A 1 Oct. 24, 1987 |
| E03937 | | Biotin-synthase | Hatakeyama, K. et al. “DNA fragment containing gene capable of coding |
| | | | biotin synthetase and its utilization,” Patent: JP 1992278088-A 1 Oct. 02, 1992 |
| E04040 | | Diamino pelargonic acid aminotransferase | Kohama, K. et al. “Gene coding diaminopelargonic acid aminotransferase and |
| | | | desthiobiotin synthetase and its utilization,” Patent: JP 1992330284-A 1 |
| | | | Nov. 18, 1992 |
| E04041 | | Desthiobiotinsynthetase | Kohama, K. et al. “Gene coding diaminopelargonic acid aminotransferase and |
| | | | desthiobiotin synthetase and its utilization,” Patent: JP 1992330284-A 1 |
| | | | Nov. 18, 1992 |
| E04307 | | Flavum aspartase | Kurusu, Y. et al. “Gene DNA coding aspartase and utilization thereof,” Patent: |
| | | | JP 1993030977-A 1 Feb. 09, 1993 |
| E04376 | | Isocitric acid lyase | Katsumata, R. et al. “Gene manifestation controlling DNA,” Patent: JP |
| | | | 1993056782-A 3 Mar. 09, 1993 |
| E04377 | | Isocitric acid lyase N-terminal fragment | Katsumata, R. et al. “Gene manifestation controlling DNA,” Patent: JP |
| | | | 1993056782-A 3 Mar. 09, 1993 |
| E04484 | | Prephenate dehydratase | Sotouchi, N. et al. “Production of L-phenylalanine by fermentation,” Patent: JP |
| | | | 199307635 2-A 2 Mar. 30, 1993 |
| E05108 | | Aspartokinase | Fugono, N. et al. “Gene DNA coding Aspartokinase and its use,” Patent: JP |
| | | | 1993184366-A 1 Jul. 27, 1993 |
| E05112 | | Dihydro-dipichorinate synthetase | Hatakeyama, K. et al. “Gene DNA coding dihydrodipicolinic acid synthetase |
| | | | and its use,” Patent: JP 1993184371-A 1 Jul. 27, 1993 |
| E05776 | | Diaminopimelic acid dehydrogenase | Kobayashi, M. et al. “Gene DNA coding Diaminopimelic acid dehydrogenase |
| | | | and its use,” Patent: JP 1993284970-A 1 Nov. 02, 1993 |
| E05779 | | Threonine synthase | Kohama, K. et al. “Gene DNA coding threonine synthase and its use,” Patent: |
| | | | JP 1993284972-A 1 Nov. 02, 1993 |
| E06110 | | Prephenate dehydratase | Kikuchi, T. et al. “Production of L-phenylalanine by fermentation method,” |
| | | | Patent: JP 1993344881-A 1 Dec. 27, 1993 |
| E06111 | | Mutated Prephenate dehydratase | Kikuchi, T. et al. “Production of L-phenylalanine by fermentation method,” |
| | | | Patent: JP 1993344881-A 1 Dec. 27, 1993 |
| E06146 | | Acetohydroxy acid synthetase | Inui, M. et al. “Gene capable of coding Acetohydroxy acid synthetase and its |
| | | | use,” Patent: JP 1993344893-A 1 Dec. 27, 1993 |
| E06825 | | Aspartokinase | Sugimoto, M. et al. “Mutant aspartokinase gene,” patent: JP 1994062866-A 1 |
| | | | Mar. 08, 1994 |
| E06826 | | Mutated aspartokinase alpha subunit | Sugimoto, M. et al. “Mutant aspartokinase gene,” patent: JP 1994062866-A 1 |
| | | | Mar. 08, 1994 |
| E06827 | | Mutated aspartokinase alpha subunit | Sugimoto, M. et al. “Mutant aspartokinase gene,” patent: JP 1994062866-A 1 |
| | | | Mar. 08, 1994 |
| E07701 | secY | | Honno, N. et al. “Gene DNA participating in integration of membraneous |
| | | | protein to membrane,” Patent: JP 1994169780-A 1 Jun. 21, 1994 |
| E08177 | | Aspartokinase | Sato, Y. et al. “Genetic DNA capable of coding Aspartokinase released from |
| | | | feedback inhibition and its utilization,” Patent: JP 1994261766-A 1 |
| | | | Sep. 20, 1994 |
| E08178, | | Feedback inhibition-released | Sato, Y. et al. “Genetic DNA capable of coding Aspartokinase released from |
| E08179, | | Aspartokinase | feedback inhibition and its utilization,” Patent: JP 1994261766-A 1 |
| E08180, | | | Sep. 20, 1994 |
| E08181, | | | |
| E08182 | | | |
| E08232 | | Acetohydroxy-acid isomeroreductase | Inui, M. et al. “Gene DNA coding acetohydroxy acid isomeroreductase,” |
| | | | Patent: JP 1994277067-A 1 Oct. 04, 1994 |
| E08234 | secE | | Asai, Y. et al. “Gene DNA coding for translocation machinery of protein,” |
| | | | Patent: JP 1994277073-A 1 Oct. 04, 1994 |
| E08643 | | FT aminotransferase and desthiobiotin | Hatakeyama, K. et al. “DNA fragment having promoter function in |
| | | synthetase promoter region | coryneform bacterium,” Patent: JP 1995031476-A 1 Feb. 03, 1995 |
| E08646 | | Biotin synthetase | Hatakeyama, K. et al. “DNA fragment having promoter function in |
| | | | coryneform bacterium,” Patent: JP 1995031476-A 1 Feb. 03, 1995 |
| E08649 | | Aspartase | Kohama, K. et al “DNA fragment having promoter function in coryneform |
| | | | bacterium,” Patent: JP 1995031478-A 1 Feb. 03, 1995 |
| E08900 | | Dihydrodipicolinate reductase | Madori, M. et al. “DNA fragment containing gene coding Dihydrodipicolinate |
| | | | acid reductase and utilization thereof,” Patent: JP 1995075578-A 1 |
| | | | Mar. 20, 1995 |
| E08901 | | Diaminopimelic acid decarboxylase | Madori, M. et al. “DNA fragment containing gene coding Diaminopimelic acid |
| | | | decarboxylase and utilization thereof,” Patent: JP 1995075579-A 1 |
| | | | Mar. 20, 1995 |
| E12594 | | Serine hydroxymethyltransferase | Hatakeyama, K. et al. “Production of L-trypophan,” Patent: JP 1997028391-A |
| | | | 1 Feb. 04, 1997 |
| E12760, | | transposase | Moriya, M. et al. “Amplification of gene using artificial transposon,” Patent: |
| E12759, | | | JP 1997070291-A Mar. 18, 1997 |
| E12758 | | | |
| E12764 | | Arginyl-tRNA synthetase; diaminopimelic | Moriya, M. et al. “Amplification of gene using artificial transposon,” Patent: |
| | | acid decarboxylase | JP 1997070291-A Mar. 18, 1997 |
| E12767 | | Dihydrodipicolinic acid synthetase | Moriya, M. et al. “Amplification of gene using artificial transposon,” Patent: |
| | | | JP 1997070291-A Mar. 18, 1997 |
| E12770 | | aspartokinase | Moriya, M. et al. “Amplification of gene using artificial transposon,” Patent: |
| | | | JP 1997070291-A Mar. 18, 1997 |
| E12773 | | Dihydrodipicolinic acid reductase | Moriya, M. et al. “Amplification of gene using artificial transposon,” Patent: |
| | | | JP 1997070291-A Mar. 18, 1997 |
| E13655 | | Glucose-6-phosphate dehydrogenase | Hatakeyama, K. et al. “Glucose-6-phosphate dehydrogenase and DNA capable |
| | | | of coding the same,” Patent: JP 1997224661-A 1 Sep. 02, 1997 |
| L01508 | IlvA | Threonine dehydratase | Moeckel, B. et al. “Functional and structural analysis of the threonine |
| | | | dehydratase of Corynebacterium glutamicum,” J. Bacteriol., 174: 8065-8072 |
| | | | (1992) |
| L07603 | EC 4.2.1.15 | 3-deoxy-D-arabinoheptulosonate-7- | Chen, C. et al. “The cloning and nucleotide sequence of Corynebacterium |
| | | phosphate synthase | glutamicum 3-deoxy-D-arabinoheptulosonate-7-phosphate synthase gene,” |
| | | | FEMS Microbiol. Lett., 107: 223-230 (1993) |
| L09232 | IlvB; ilvN; | Acetohydroxy acid synthase large subunit; | Keilhauer, C. et al. “Isoleucine synthesis in Corynebacterium glutamicum: |
| | ilvC | Acetohydroxy acid synthase small subunit; | molecular analysis of the ilvB-ilvN-ilvC operon,” J. Bacteriol., 175(17): |
| | | Acetohydroxy acid isomeroreductase | 5595-5603 (1993) |
| L18874 | PtsM | Phosphoenolpyruvate sugar | Fouet, A et al. “Bacillus subtilis sucrose-specific enzyme II of the |
| | | phosphotransferase | phosphotransferase system: expression in Escherichia coli and homology to |
| | | | enzymes II from enteric bacteria,” PNAS USA, 84(24): 8773-8777 |
| | | | (1987); Lee, J. K. et al. “Nucleotide sequence of the gene encoding |
| | | | the Corynebacterium glutamicum mannose enzyme II and |
| | | | analyses of the deduced protein |
| | | | sequence,” FEMS Microbiol. Lett., 119(1-2): 137-145 (1994) |
| L27123 | aceB | Malate synthase | Lee, H-S. et al. “Molecular characterization of aceB, a gene encoding malate |
| | | | synthase in Corynebacterium glutamicum,” J. Microbiol. Biotechnol., |
| | | | 4(4): 256-263 (1994) |
| L27126 | | Pyruvate kinase | Jetten, M. S. et al. “Structural and functional analysis of pyruvate kinase from |
| | | | Corynebacterium glutamicum,” Appl. Environ. Microbiol., 60(7): 2501-2507 |
| | | | (1994) |
| L28760 | aceA | Isocitrate lyase | |
| L35906 | dtxr | Diphtheria toxin repressor | Oguiza, J. A. et al. “Molecular cloning, DNA sequence analysis, and |
| | | | characterization of the Corynebacterium diphtheriae dtxR from Brevibacterium |
| | | | lactofermentum,” J. Bacteriol., 177(2): 465-467 (1995) |
| M13774 | | Prephenate dehydratase | Follettie, M. T. et al. “Molecular cloning and nucleotide sequence of the |
| | | | Corynebacterium glutamicum pheA gene,” J. Bacteriol., 167: 695-702 (1986) |
| M16175 | 5S rRNA | | Park, Y-H. et al. “Phylogenetic analysis of the coryneform bacteria by 56 |
| | | | rRNA sequences,” J. Bacteriol., 169: 1801-1806 (1987) |
| M16663 | trpE | Anthranilate synthase, 5′ end | Sano, K. et al. “Structure and function of the trp operon control regions of |
| | | | Brevibacterium lactofermentum, a glutamic-acid-producing bacterium,” Gene, |
| | | | 52: 191-200 (1987) |
| M16664 | trpA | Tryptophan synthase, 3′end | Sano, K. et al. “Structure and function of the trp operon control regions of |
| | | | Brevibacterium lactofermentum, a glutamic-acid-producing bacterium,” Gene, |
| | | | 52: 191-200 (1987) |
| M25819 | | Phosphoenolpyruvate carboxylase | O'Regan, M. et al. “Cloning and nucleotide sequence of the |
| | | | Phosphoenolpyruvate carboxylase-coding gene of Corynebacterium |
| | | | glutamicum ATCC13032,” Gene, 77(2): 237-251 (1989) |
| M85106 | | 23S rRNA gene insertion sequence | Roller, C. et al. “Gram-positive bacteria with a high DNA G + C content are |
| | | | characterized by a common insertion within their 23S rRNA genes,” J. Gen. |
| | | | Microbiol., 138: 1167-1175 (1992) |
| M85107, | | 23S rRNA gene insertion sequence | Roller, C. et al. “Gram-positive bacteria with a high DNA G + C content are |
| M85108 | | | characterized by a common insertion within their 23S rRNA genes,” J. Gen. |
| | | | Microbiol., 138: 1167-1175 (1992) |
| M89931 | aecD; brnQ; | Beta C-S lyase; branched-chain | Rossol, I. et al. “The Corynebacterium glutamicum aecD gene encodes a C-S |
| | yhbw | amino acid | lyase with alpha, beta-elimination activity that degrades aminoethylcysteine,” |
| | | uptake carrier; hypothetical protein yhbw | J. Bacteriol., 174(9): 2968-2977 (1992); Tauch, A. et al. “Isoleucine uptake in |
| | | | Corynebacterium glutamicum ATCC 13032 is directed by the brnQ gene |
| | | | product,” Arch. Microbiol., 169(4): 303-312 (1998) |
| S59299 | trp | Leader gene (promoter) | Herry, D. M. et al. “Cloning of the trp gene cluster from a tryptophan- |
| | | | hyperproducing strain of Corynebacterium glutamicum: identification of a |
| | | | mutation in the trp leader sequence,” Appl. Environ. Microbiol., 59(3): |
| | | | 791-799 (1993) |
| U11545 | trpD | Anthranilate phosphoribosyltransferase | O'Gara, J. P. and Dunican, L. K. (1994) Complete nucleotide sequence of the |
| | | | Corynebacterium glutamicum ATCC 21850 tpD gene.” Thesis, Microbiology |
| | | | Department, University College Galway, Ireland. |
| U13922 | cglIM; | Putative type II 5-cytosoine | Schafer, A. et al. “Cloning and characterization of a DNA region encoding a |
| | cglIR; clgIIR | methyltransferase; putative type II | stress-sensitive restriction system from Corynebacterium glutamicum ATCC |
| | | restriction endonuclease; putative type I or | 13032 and analysis of its role in intergeneric conjugation with Escherichia |
| | | type III restriction endonuclease | coli,” J. Bacteriol., 176(23): 7309-7319 (1994); Schafer, A. et al. “The |
| | | | Corynebacterium glutamicum cglIM gene encoding a 5-cytosine in an McrBC- |
| | | | deficient Escherichia coli strain,” Gene, 203(2): 95-101 (1997) |
| U14965 | recA | | |
| U31224 | ppx | | Ankri, S. et al. “Mutations in the Corynebacterium glutamicumproline |
| | | | biosynthetic pathway: A natural bypass of the proA step,” J. Bacteriol., |
| | | | 178(15): 4412-4419 (1996) |
| U31225 | proC | L-proline: NADP+ 5-oxidoreductase | Ankri, S. et al. “Mutations in the Corynebacterium glutamicumproline |
| | | | biosynthetic pathway: A natural bypass of the proA step,” J. Bacteriol., |
| | | | 178(15): 4412-4419 (1996) |
| U31230 | obg; proB; | ?; gamma glutamyl kinase; similar to D- | Ankri, S. et al. “Mutations in the Corynebacterium glutamicumproline |
| | unkdh | isomer specific 2-hydroxyacid | biosynthetic pathway: A natural bypass of the proA step,” J. Bacteriol., |
| | | dehydrogenases | 178(15): 4412-4419 (1996) |
| U31281 | bioB | Biotin synthase | Serebriiskii, I. G., “Two new members of the bio B superfamily: Cloning, |
| | | | sequencing and expression of bio B genes of Methylobacillus flagellatum and |
| | | | Corynebacterium glutamicum,” Gene, 175: 15-22 (1996) |
| U35023 | thtR; accBC | Thiosulfate sulfurtransferase; acyl CoA | Jager, W. et al. “A Corynebacterium glutamicum gene encoding a two-domain |
| | | carboxylase | protein similar to biotin carboxylases and biotin-carboxyl-carrier proteins,” |
| | | | Arch. Microbiol., 166(2); 76-82 (1996) |
| U43535 | cmr | Multidrug resistance protein | Jager, W. et al. “A Corynebacterium glutamicum gene conferring multidrug |
| | | | resistance in the heterologous host Escherichia coli,” J. Bacteriol., |
| | | | 179(7): 2449-2451 (1997) |
| U43536 | clpB | Heat shock ATP-binding protein | |
| U53587 | aphA-3 | 3′5″-aminoglycoside phosphotransferase | |
| U89648 | | Corynebacterium glutamicum unidentified | |
| | | sequence involved in histidine | |
| | | biosynthesis, partial sequence | |
| X04960 | trpA; trpB; | Tryptophan operon | Matsui, K. et al. “Complete nucleotide and deduced amino acid sequences of |
| | trpC; trpD; | | the Brevibacterium lactofermentum tryptophan operon,” Nucleic Acids Res., |
| | trpE; trpG; | | 14(24): 10113-10114 (1986) |
| | trpL | | |
| X07563 | lys A | DAP decarboxylase | Yeh, P. et al. “Nucleic sequence of the lysA gene of Corynebacterium |
| | | (meso-diaminopimelate | glutamicum and possible mechanisms for modulation of its expression,” Mol. |
| | | decarboxylase, EC 4.1.1.20) | Gen. Genet., 212(1): 112-119 (1988) |
| X14234 | EC 4.1.1.31 | Phosphoenolpyruvate carboxylase | Eikmanns, B. J. et al. “The Phosphoenolpyruvate carboxylase gene of |
| | | | Corynebacterium glutamicum: Molecular cloning, nucleotide sequence, and |
| | | | expression,” Mol. Gen. Genet., 218(2): 330-339 (1989); Lepiniec, L. et al. |
| | | | “Sorghum Phosphoenolpyruvate carboxylase gene family: structure, function |
| | | | and molecular evolution,” Plant. Mol. Biol., 21 (3): 487-502 (1993) |
| X17313 | fda | Fructose-bisphosphate aldolase | Von der Osten, C. H. et al. “Molecular cloning, nucleotide sequence and fine- |
| | | | structural analysis of the Corynebacterium glutamicum fda gene: structural |
| | | | comparison of C. glutamicum fructose-1,6-biphosphate aldolase to class I and |
| | | | class II aldolases,” Mol. Microbiol., |
| X53993 | dapA | L-2,3-dihydrodipicolinate synthetase (EC | Bonnassie, S. et al. “Nucleic sequence of the dapA gene from |
| | | 4.2.1.52) | Corynebacterium glutamicum,” Nucleic Acids Res., 18(21): 6421 (1990) |
| X54223 | | AttB-related site | Cianciotto, N. et al. “DNA sequence homology between att B-related sites of |
| | | | Corynebacterium diphtheriae, Corynebacterium ulcerans, Corynebacterium |
| | | | glutamicum, and the attP site of lambdacorynephage,” FEMS. Microbiol, |
| | | | Lett., 66: 299-302 (1990) |
| X54740 | argS; lysA | Arginyl-tRNA synthetase; | Marcel, T. et al. “Nucleotide sequence and organization of the upstream region |
| | | Diaminopimelate decarboxylase | of the Corynebacterium glutamicum lysA gene,” Mol. Microbiol., 4(11): |
| | | | 1819-1830 (1990) |
| X55994 | trpL; trpE | Putative leader peptide; anthranilate | Heery, D. M. et al. “Nucleotide sequence of the Corynebacterium glutamicum |
| | | synthase component 1 | trpE gene,” Nucleic Acids Res., 18(23): 7138 (1990) |
| X56037 | thrC | Threonine synthase | Han, K. S. et al. “The molecular structure of the Corynebacterium glutamicum |
| | | | threonine synthase gene,” Mol. Microbiol., 4(10): 1693-1702 (1990) |
| X56075 | attB-related | Attachment site | Cianciotto, N. et al. “DNA sequence homology between att B-related sites of |
| | site | | Corynebacterium diphtheriae, Corynebacterium ulcerans, Corynebacterium |
| | | | glutamicum, and the attP site of lambdacorynephage,” FEMS. Microbiol, |
| | | | Lett., 66: 299-302 (1990) |
| X57226 | lysC-alpha; | Aspartokinase-alpha subunit; | Kalinowski, J. et al. “Genetic and biochemical analysis of the Aspartokinase |
| | lysC-beta; | Aspartokinase-beta subunit; aspartate beta | from Corynebacterium glutamicum,” Mol. Microbiol., 5(5): |
| | asd | semialdehyde dehydrogenase | 1197-1204 (1991); Kalinowski, J. et al. |
| | | | “Aspartokinase genes lysC alpha and lysC beta overlap |
| | | | and are adjacent to the aspertate beta-semialdehyde dehydrogenase gene asd in |
| | | | Corynebacterium glutamicum,” Mol. Gen. Genet., 224(3): 317-324 (1990) |
| X59403 | gap; pgk; tpi | Glyceraldehyde-3-phosphate; | Eikmanns, B. J. “Identification, sequence analysis, and expression of a |
| | | phosphoglycerate kinase; triosephosphate | Corynebacterium glutamicum gene cluster encoding the three glycolytic |
| | | isomerase | enzymes glyceraldehyde-3-phosphate dehydrogenase, 3-phosphoglycerate |
| | | | kinase, and triosephosphate isomeras,” J. Bacteriol., 174(19): 6076-6086 |
| | | | (1992) |
| X59404 | gdh | Glutamate dehydrogenase | Bormann, E. R. et al. “Molecular analysis of the Corynebacterium glutamicum |
| | | | gdh gene encoding glutamate dehydrogenase,” Mol. Microbiol., 6(3): 317-326 |
| | | | (1992) |
| X60312 | lysI | L-lysine permease | Seep-Feldhaus, A. H. et al. “Molecular analysis of the Corynebacterium |
| | | | glutamicum lysI gene involved in lysine uptake,” Mol. Microbiol., 5(12): |
| | | | 2995-3005 (1991) |
| X66078 | cop1 | Ps1 protein | Joliff, G. et al. “Cloning and nucleotide sequence of the csp1 gene encoding |
| | | | PS1, one of the two major secreted proteins of Corynebacterium glutamicum: |
| | | | The deduced N-terminal region of PS1 is similar to the Mycobacterium antigen |
| | | | 85 complex,” Mol. Microbiol., 6(16): 2349-2362 (1992) |
| X66112 | glt | Citrate synthase | Eikmanns, B. J. et al. “Cloning sequence, expression and transcriptional |
| | | | analysis of the Corynebacterium glutamicum gltA gene encoding citrate |
| | | | synthase,” Microbiol., 140: 1817-1828 (1994) |
| X67737 | dapB | Dihydrodipicolinate reductase | |
| X69103 | csp2 | Surface layer protein PS2 | Peyret, J. L. et al. “Characterization of the cspB gene encoding PS2, an ordered |
| | | | surface-layer protein in Corynebacterium glutamicum,” Mol. Microbiol., |
| | | | 9(1): 97-109 (1993) |
| X69104 | | IS3 related insertion element | Bonamy, C. et al. “Identification of IS1206, a Corynebacterium glutamicum |
| | | | IS3-related insertion sequence and phylogenetic analysis,” Mol. Microbiol., |
| | | | 14(3): 571-581 (1994) |
| X70959 | leuA | Isopropylmalate synthase | Patek, M. et al. “Leucine synthesis in Corynebacterium glutamicum: enzyme |
| | | | activities, structure of leuA, and effect of leuA inactivation on lysine |
| | | | synthesis,” Appl. Environ. Microbiol., 60(1): 133-140 (1994) |
| X71489 | icd | Isocitrate dehydrogenase (NADP+) | Eikmanns, B. J. et al. “Cloning sequence analysis, expression, and inactivation |
| | | | of the Corynebacterium glutamicum icd gene encoding isocitrate |
| | | | dehydrogenase and biochemical characterization of the enzyme,” J. Bacteriol., |
| | | | 177(3): 774-782 (1995) |
| X72855 | GDHA | Glutamate dehydrogenase (NADP+) | |
| X75083, | mtrA | 5-methyltryptophan resistance | Heery, D. M. et al. “A sequence from a tryptophan-hyperproducing strain of |
| X70584 | | | Corynebacterium glutamicum encoding resistance to 5-methyltryptophan,” |
| | | | Biochem. Biophys. Res. Commun., 201(3): 1255-1262 (1994) |
| X75085 | recA | | Fitzpatrick, R. et al. “Construction and characterization of recA mutant strains |
| | | | of Corynebacterium glutamicum and Brevibacterium lactofermentum,” Appl. |
| | | | Microbiol. Biotechnol., 42(4): 575-580 (1994) |
| X75504 | aceA; thiX | Partial Isocitrate lyase; ? | Reinscheid, D. J. et al. “Characterization of the isocitrate lyase gene from |
| | | | Corynebacterium glutamicum and biochemical analysis of the enzyme,” J. |
| | | | Bacteriol., 176(12): 3474-3483 (1994) |
| X76875 | | ATPase beta-subunit | Ludwig, W. et al. “Phylogenetic relationships of bacteria based on comparative |
| | | | sequence analysis of elongation factor Tu and ATP-synthase beta-subunit |
| | | | genes,” Antonie Van Leeuwenhoek, 64: 285-305 (1993) |
| X77034 | tuf | Elongation factor Tu | Ludwig, W. et al. “Phylogenetic relationships of bacteria based on comparative |
| | | | sequence analysis of elongation factor Tu and ATP-synthase beta-subunit |
| | | | genes,” Antonie Van Leeuwenhoek, 64: 285-305 (1993) |
| X77384 | recA | | Billman-Jacobe, H. “Nucleotide sequence of a recA gene from |
| | | | Corynebacterium glutamicum,” DNA Seq., 4(6): 403-404 (1994) |
| X78491 | aceB | Malate synthase | Reinscheid, D. J. et al. “Malate synthase from Corynebacterium glutamicum |
| | | | pta-ack operon encoding phosphotransacetylase: sequence analysis,” |
| | | | Microbiology, 140: 3099-3108 (1994) |
| X80629 | 16S rDNA | 16S ribosomal RNA | Rainey, F. A. et al. “Phylogenetic analysis of the genera Rhodococcus and |
| | | | Norcardia and evidence for the evolutionary origin of the genus Norcardia |
| | | | from within the radiation of Rhodococcus species,” Microbiol., 141: 523-528 |
| | | | (1995) |
| X81191 | gluA; gluB; | Glutamate uptake system | Kronemeyer, W. et al. “Structure of the gluABCD cluster encoding the |
| | gluC; gluD | | glutamate uptake system of Corynebacterium glutamicum,” J. Bacteriol., |
| | | | 177(5): 1152-1158 (1995) |
| X81379 | dapE | Succinyldiaminopimelate desuccinylase | Wehrmann, A. et al. “Analysis of different DNA fragments of |
| | | | Corynebacterium glutamicum complementing dapE of Escherichia coli,” |
| | | | Microbiology, 40: 3349-56 (1994) |
| X82061 | 16S rDNA | 16S ribosomal RNA | Ruimy, R. et al. “Phylogeny of the genus Corynebacterium deduced from |
| | | | analyses of small-subunit ribosomal DNA sequences,” Int. J. Syst. Bacteriol., |
| | | | 45(4): 740-746 (1995) |
| X82928 | asd; lysC | Aspartate-semialdehyde dehydrogenase; ? | Serebrijski, I. et al. “Multicopy suppression by asd gene and osmotic stress- |
| | | | dependent complementation by heterologous proA in proA mutants,” J. |
| | | | Bacteriol., 177(24): 7255-7260 (1995) |
| X82929 | proA | Gamma-glutamyl phosphate reductase | Serebrijski, I. et al. “Multicopy suppression by asd gene and osmotic stress- |
| | | | dependent complementation by heterologous proA in proA mutants,” J. |
| | | | Bacteriol., 177(24): 7255-7260 (1995) |
| X84257 | 16S rDNA | 16S ribosomal RNA | Pascual, C. et al. “Phylogenetic analysis of the genus Corynebacterium based |
| | | | on 16S rRNA gene sequences,” Int. J. Syst. Bacteriol., 45(4): 724-728 (1995) |
| X85965 | aroP; dapE | Aromatic amino acid permease; ? | Wehrmann, A. et al. “Functional analysis of sequences adjacent to dapE of |
| | | | Corynebacterium glutamicumproline reveals the presence of aroP, which |
| | | | encodes the aromatic amino acid transporter,” J. Bacteriol., 177(20): |
| | | | 5991-5993 (1995) |
| X86157 | argB; argC; | Acetylglutamate kinase; N-acetyl-gamma- | Sakanyan, V. et al. “Genes and enzymes of the acetyl cycle of arginine |
| | argD; argF; | glutamyl-phosphate reductase; | biosynthesis in Corynebacterium glutamicum: enzyme evolution in the early |
| | argJ | acetylornithine aminotransferase; ornithine | steps of the arginine pathway,” Microbiology, 142: 99-108 (1996) |
| | | carbamoyltransferase; glutamate N- | |
| | | acetyltransferase | |
| X89084 | pta; ackA | Phosphate acetyltransferase; acetate kinase | Reinscheid, D. J. et al. “Cloning, sequence analysis, expression and |
| | | | inactivation of the Corynebacterium glutamicum pta-ack operon encoding |
| | | | phosphotransacetylase and acetate kinase,” Microbiology, 145: 503-513 (1999) |
| X89850 | attB | Attachment site | Le Marrec, C. et al. “Genetic characterization of site-specific integration |
| | | | functions of phi AAU2 infecting “Arthrobacter aureus C70,” J. Bacteriol., |
| | | | 178(7): 1996-2004 (1996) |
| X90356 | | Promoter fragment F1 | Patek, M. et al. “Promoters from Corynebacterium glutamicum: cloning, |
| | | | molecular analysis and search for a consensus motif,” Microbiology, |
| | | | 142: 1297-1309 (1996) |
| X90357 | | Promoter fragment F2 | Patek, M. et al. “Promoters from Corynebacterium glutamicum: cloning, |
| | | | molecular analysis and search for a consensus motif,” Microbiology, |
| | | | 142: 1297-1309 (1996) |
| X90358 | | Promoter fragment F10 | Patek, M. et al. “Promoters from Corynebacterium glutamicum: cloning, |
| | | | molecular analysis and search for a consensus motif,” Microbiology, |
| | | | 142: 1297-1309 (1996) |
| X90359 | | Promoter fragment F13 | Patek, M. et al. “Promoters from Corynebacterium glutamicum: cloning, |
| | | | molecular analysis and search for a consensus motif,” Microbiology, |
| | | | 142: 1297-1309 (1996) |
| X90360 | | Promoter fragment F22 | Patek, M. et al. “Promoters from Corynebacterium glutamicum: cloning, |
| | | | molecular analysis and search for a consensus motif,” Microbiology, |
| | | | 142: 1297-1309 (1996) |
| X90361 | | Promoter fragment F34 | Patek, M. et al. “Promoters from Corynebacterium glutamicum: cloning, |
| | | | molecular analysis and search for a consensus motif,” Microbiology, |
| | | | 142: 1297-1309 (1996) |
| X90362 | | Promoter fragment F37 | Patek, M. et al. “Promoters from Corynebacterium glutamicum: cloning, |
| | | | molecular analysis and search for a consensus motif,” Microbiology, |
| | | | 142: 1297-1309 (1996) |
| X90363 | | Promoter fragment F45 | Patek, M. et al. “Promoters from Corynebacterium glutamicum: cloning, |
| | | | molecular analysis and search for a consensus motif,” Microbiology, |
| | | | 142: 1297-1309 (1996) |
| X90364 | | Promoter fragment F64 | Patek, M. et al. “Promoters from Corynebacterium glutamicum: cloning, |
| | | | molecular analysis and search for a consensus motif,” Microbiology, |
| | | | 142: 1297-1309 (1996) |
| X90365 | | Promoter fragment F75 | Patek, M. et al. “Promoters from Corynebacterium glutamicum: cloning, |
| | | | molecular analysis and search for a consensus motif,” Microbiology, |
| | | | 142: 1297-1309 (1996) |
| X90366 | | Promoter fragment PF101 | Patek, M. et al. “Promoters from Corynebacterium glutamicum: cloning, |
| | | | molecular analysis and search for a consensus motif,” Microbiology, |
| | | | 142: 1297-1309 (1996) |
| X90367 | | Promoter fragment PF104 | Patek, M. et al. “Promoters from Corynebacterium glutamicum: cloning, |
| | | | molecular analysis and search for a consensus motif,” Microbiology, |
| | | | 142: 1297-1309 (1996) |
| X90368 | | Promoter fragment PF109 | Patek, M. et al. “Promoters from Corynebacterium glutamicum: cloning, |
| | | | molecular analysis and search for a consensus motif,” Microbiology, |
| | | | 142: 1297-1309 (1996) |
| X93513 | amt | Ammonium transport system | Siewe, R. M. et al. “Functional and genetic characterization of the (methyl) |
| | | | ammonium uptake carrier of Corynebacterium glutamicum,” J. Biol. Chem., |
| | | | 271(10): 5398-5403 (1996) |
| X93514 | betP | Glycine betaine transport system | Peter, H. et al. “Isolation, characterization, and expression of the |
| | | | Corynebacterium glutamicum betP gene, encoding the transport system for the |
| | | | compatible solute glycine betaine,” J. Bacteriol., 178(17): 5229-5234 (1996) |
| X95649 | orf4 | | Patek, M. et al. “Identification and transcriptional analysis of the dapB-ORF2- |
| | | | dapA-ORF4 operon of Corynebacterium glutamicum, encoding two enzymes |
| | | | involved in L-lysine synthesis,” Biotechnol. Lett., 19: 1113-1117 (1997) |
| X96471 | lysE; lysG | Lysine exporter protein; Lysine export | Vrljic, M. et al. “A new type of transporter with a new type of cellular |
| | | regulator protein | function: L-lysine export from Corynebacterium glutamicum,” Mol. |
| | | | Microbiol., 22(5): 815-826 (1996) |
| X96580 | panB; panC; | 3-methyl-2-oxobutanoate | Sahm, H. et al. “D-pantothenate synthesis in Corynebacterium glutamicum and |
| | xylB | hydroxymethyltransferase; pantoate-beta- | use of panBC and genes encoding L-valine synthesis for D-pantothenate |
| | | alanine ligase; xylulokinase | overproduction,” Appl. Environ. Microbiol., 65(5): 1973-1979 (1999) |
| X96962 | | Insertion sequence IS1207 and transposase | |
| X99289 | | Elongation factor P | Ramos, A. et al. “Cloning, sequencing and expression of the gene encoding |
| | | | elongation factor P in the amino-acid producer Brevibacterium lactofermentum |
| | | | (Corynebacterium glutamicum ATCC 13869),” Gene, 198: 217-222 (1997) |
| Y00140 | thrB | Homoserine kinase | Mateos, L. M. et al. “Nucleotide sequence of the homoserine kinase (thrB) |
| | | | gene of the Brevibacterium lactofermentum,” Nucleic Acids Res., |
| | | | 15(9): 3922 (1987) |
| Y00151 | ddh | Meso-diaminopimelate D-dehydrogenase | Ishino, S. et al. “Nucleotide sequence of the meso-diaminopimelate D- |
| | | (EC 1.4.1.16) | dehydrogenase gene from Corynebacterium glutamicum,” Nucleic Acids Res., |
| | | | 15(9): 3917 (1987) |
| Y00476 | thrA | Homoserine dehydrogenase | Mateos, L. M. et al. “Nucleotide sequence of the homoserine dehydrogenase |
| | | | (thrA) gene of the Brevibacterium lactofermentum,” Nucleic Acids Res., |
| | | | 15(24): 10598 (1987) |
| Y00546 | hom; thrB | Homoserine dehydrogenase; homoserine | Peoples, O. P. et al. “Nucleotide sequence and fine structural analysis of the |
| | | kinase | Corynebacterium glutamicum hom-thrB operon,” Mol. Microbiol., 2(1): 63-72 |
| | | | (1988) |
| Y08964 | murC; | UPD-N-acetylmuramate-alanine ligase; | Honrubia, M. P. et al. “Identification, characterization, and chromosomal |
| | ftsQ/divD; | division initiation protein or cell division | organization of the ftsZ gene from Brevibacterium lactofermentum,” Mol. Gen. |
| | ftsZ | protein; cell division protein | Genet., 259(1): 97-104 (1998) |
| Y09163 | putP | High affinity proline transport system | Peter, H. et al. “Isolation of the putP gene of Corynebacterium |
| | | | glutamicumproline and characterization of a low-affinity uptake system for |
| | | | compatible solutes,” Arch. Microbiol., 168(2): 143-151 (1997) |
| Y09548 | pyc | Pyruvate carboxylase | Peters-Wendisch, P. G. et al. “Pyruvate carboxylase from Corynebacterium |
| | | | glutamicum: characterization, expression and inactivation of the pyc gene,” |
| | | | Microbiology, 144: 915-927 (1998) |
| Y09578 | leuB | 3-isopropylmalate dehydrogenase | Patek, M. et al. “Analysis of the leuB gene from Corynebacterium |
| | | | glutamicum,” Appl. Microbiol. Biotechnol., 50(1): 42-47 (1998) |
| Y12472 | | Attachment site bacteriophage Phi-16 | Moreau, S. et al. “Site-specific integration of corynephage Phi-16: The |
| | | | construction of an integration vector,” Microbiol., 145: 539-548 1999 |
| Y12537 | proP | Proline/ectoine uptake system protein | Peter, H. et al. “Corynebacterium glutamicum is equipped with four secondary |
| | | | carriers for compatible solutes: Identification, sequencing, and characterization |
| | | | of the proline/ectoine uptake system, ProP, and the ectoine/proline/glycine |
| | | | betaine carrier, EctP,” J. Bacteriol., 180(22): 6005-6012 (1998) |
| Y13221 | glnA | Glutamine synthetase I | Jakoby, M. et al. “Isolation of Corynebacterium glutamicum glnA gene |
| | | | encoding glutamine synthetase I,” FEMS Microbiol. Lett., 154(1): |
| | | | 81-88 (1997) |
| Y16642 | lpd | Dihydrolipoamide dehydrogenase | |
| Y18059 | | Attachment site Corynephage 304L | Moreau, S. et al. “Analysis of the integration functions of &phi; 304L: An |
| | | | integrase module among corynephages,” Virology, 255(1): 150-159 (1999) |
| Z21501 | argS; lysA | Arginyl-tRNA synthetase; | Oguiza, J. A. et al. “A gene encoding arginyl-tRNA synthetase is located in the |
| | | diaminopimelate | upstream region of the lysA gene in Brevibacterium lactofermentum: |
| | | decarboxylase (partial) | Regulation of argS-lysA cluster expression by arginine,” J. Bacteriol., |
| | | | 175(22): 7356-7362 (1993) |
| Z21502 | dapA; dapB | Dihydrodipicolinate synthase; | Pisabarro, A. et al. “A cluster of three genes (dapA, orf2, and dapB) of |
| | | dihydrodipicolinate reductase | Brevibacterium lactofermentum encodes dihydrodipicolinate reductase, and a |
| | | | third polypeptide of unknown function,” J. Bacteriol., 175(9): 2743-2749 |
| | | | (1993) |
| Z29563 | thrC | Threonine synthase | Malumbres, M. et al. “Analysis and expression of the thrC gene of the encoded |
| | | | threonine synthase,” Appl. Environ. Microbiol., 60(7)2209-2219 (1994) |
| Z46753 | 16S rDNA | Gene for 16S ribosomal RNA | |
| Z49822 | sigA | SigA sigma factor | Oguiza, J. A. et al “Multiple sigma factor genes in Brevibacterium |
| | | | lactofermentum: Characterization of sigA and sigB,” J. Bacteriol., 178(2): |
| | | | 550-553 (1996) |
| Z49823 | galE; dtxR | Catalytic activity UDP-galactose 4- | Oguiza, J. A. et al “The galE gene encoding the UDP-galactose 4-epimerase of |
| | | epimerase; diphtheria toxin regulatory | Brevibacterium lactofermentum is coupled transcriptionally to the dmdR |
| | | protein | gene,” Gene, 177: 103-107 (1996) |
| Z49824 | orf1; sigB | ?; SigB sigma factor | Oguiza, J. A. et al “Multiple sigma factor genes in Brevibacterium |
| | | | lactofermentum: Characterization of sigA and sigB,” J. Bacteriol., 178(2): |
| | | | 550-553 (1996) |
| Z66534 | | Transposase | Correia, A. et al. “Cloning and characterization of an IS-like element present in |
| | | | the genome of Brevibacterium lactofermentum ATCC 13869,” Gene, |
| | | | 170(1): 91-94 (1996) |

¹A sequence for this gene was published in the indicated reference. However, the sequence obtained by the inventors of the present application is significantly longer than the published version. It is believed that the published version relied on an incorrect start codon, and thus represents only a fragment of the actual coding region.

[0196] TABLE 3
Corynebacterium and Brevibacterium Strains Which May be Used in the Practice of the Invention

| Genus | species | ATCC | FERM | NRRL | CECT | NCIMB | CBS | NCTC | DSMZ |
|---|---|---|---|---|---|---|---|---|---|
| Brevibacterium | ammoniagenes | 21054 | | | | | | | |
| Brevibacterium | ammoniagenes | 19350 | | | | | | | |
| Brevibacterium | ammoniagenes | 19351 | | | | | | | |
| Brevibacterium | ammoniagenes | 19352 | | | | | | | |
| Brevibacterium | ammoniagenes | 19353 | | | | | | | |
| Brevibacterium | ammoniagenes | 19354 | | | | | | | |
| Brevibacterium | ammoniagenes | 19355 | | | | | | | |
| Brevibacterium | ammoniagenes | 19356 | | | | | | | |
| Brevibacterium | ammoniagenes | 21055 | | | | | | | |
| Brevibacterium | ammoniagenes | 21077 | | | | | | | |
| Brevibacterium | ammoniagenes | 21553 | | | | | | | |
| Brevibacterium | ammoniagenes | 21580 | | | | | | | |
| Brevibacterium | ammoniagenes | 39101 | | | | | | | |
| Brevibacterium | butanicum | 21196 | | | | | | | |
| Brevibacterium | divaricatum | 21792 | P928 | | | | | | |
| Brevibacterium | flavum | 21474 | | | | | | | |
| Brevibacterium | flavum | 21129 | | | | | | | |
| Brevibacterium | flavum | 21518 | | | | | | | |
| Brevibacterium | flavum | | | B11474 | | | | | |
| Brevibacterium | flavum | | | B11472 | | | | | |
| Brevibacterium | flavum | 21127 | | | | | | | |
| Brevibacterium | flavum | 21128 | | | | | | | |
| Brevibacterium | flavum | 21427 | | | | | | | |
| Brevibacterium | flavum | 21475 | | | | | | | |
| Brevibacterium | flavum | 21517 | | | | | | | |
| Brevibacterium | flavum | 21528 | | | | | | | |
| Brevibacterium | flavum | 21529 | | | | | | | |
| Brevibacterium | flavum | | | B11477 | | | | | |
| Brevibacterium | flavum | | | B11478 | | | | | |
| Brevibacterium | flavum | 21127 | | | | | | | |
| Brevibacterium | flavum | | | B11474 | | | | | |
| Brevibacterium | healii | 15527 | | | | | | | |
| Brevibacterium | ketoglutamicum | 21004 | | | | | | | |
| Brevibacterium | ketoglutamicum | 21089 | | | | | | | |
| Brevibacterium | ketosoreductum | 21914 | | | | | | | |
| Brevibacterium | lactofermentum | | | | 70 | | | | |
| Brevibacterium | lactofermentum | | | | 74 | | | | |
| Brevibacterium | lactofermentum | | | | 77 | | | | |
| Brevibacterium | lactofermentum | 21798 | | | | | | | |
| Brevibacterium | lactofermentum | 21799 | | | | | | | |
| Brevibacterium | lactofermentum | 21800 | | | | | | | |
| Brevibacterium | lactofermentum | 21801 | | | | | | | |
| Brevibacterium | lactofermentum | | | B11470 | | | | | |
| Brevibacterium | lactofermentum | | | B11471 | | | | | |
| Brevibacterium | lactofermentum | 21086 | | | | | | | |
| Brevibacterium | lactofermentum | 21420 | | | | | | | |
| Brevibacterium | lactofermentum | 21086 | | | | | | | |
| Brevibacterium | lactofermentum | 31269 | | | | | | | |
| Brevibacterium | linens | 9174 | | | | | | | |
| Brevibacterium | linens | 19391 | | | | | | | |
| Brevibacterium | linens | 8377 | | | | | | | |
| Brevibacterium | paraffinolyticum | | | | | 11160 | | | |
| Brevibacterium | spec. | | | | | | 717.73 | | |
| Brevibacterium | spec. | | | | | | 717.73 | | |
| Brevibacterium | spec. | 14604 | | | | | | | |
| Brevibacterium | spec. | 21860 | | | | | | | |
| Brevibacterium | spec. | 21864 | | | | | | | |
| Brevibacterium | spec. | 21865 | | | | | | | |
| Brevibacterium | spec. | 21866 | | | | | | | |
| Brevibacterium | spec. | 19240 | | | | | | | |
| Corynebacterium | acetoacidophilum | 21476 | | | | | | | |
| Corynebacterium | acetoacidophilum | 13870 | | | | | | | |
| Corynebacterium | acetoglutamicum | | | B11473 | | | | | |
| Corynebacterium | acetoglutamicum | | | B11475 | | | | | |
| Corynebacterium | acetoglutamicum | 15806 | | | | | | | |
| Corynebacterium | acetoglutamicum | 21491 | | | | | | | |
| Corynebacterium | acetoglutamicum | 31270 | | | | | | | |
| Corynebacterium | acetophilum | | | B3671 | | | | | |
| Corynebacterium | ammoniagenes | 6872 | | | | | | 2399 | |
| Corynebacterium | ammoniagenes | 15511 | | | | | | | |
| Corynebacterium | fujiokense | 21496 | | | | | | | |
| Corynebacterium | glutamicum | 14067 | | | | | | | |
| Corynebacterium | glutamicum | 39137 | | | | | | | |
| Corynebacterium | glutamicum | 21254 | | | | | | | |
| Corynebacterium | glutamicum | 21255 | | | | | | | |
| Corynebacterium | glutamicum | 31830 | | | | | | | |
| Corynebacterium | glutamicum | 13032 | | | | | | | |
| Corynebacterium | glutamicum | 14305 | | | | | | | |
| Corynebacterium | glutamicum | 15455 | | | | | | | |
| Corynebacterium | glutamicum | 13058 | | | | | | | |
| Corynebacterium | glutamicum | 13059 | | | | | | | |
| Corynebacterium | glutamicum | 13060 | | | | | | | |
| Corynebacterium | glutamicum | 21492 | | | | | | | |
| Corynebacterium | glutamicum | 21513 | | | | | | | |
| Corynebacterium | glutamicum | 21526 | | | | | | | |
| Corynebacterium | glutamicum | 21543 | | | | | | | |
| Corynebacterium | glutamicum | 13287 | | | | | | | |
| Corynebacterium | glutamicum | 21851 | | | | | | | |
| Corynebacterium | glutamicum | 21253 | | | | | | | |
| Corynebacterium | glutamicum | 21514 | | | | | | | |
| Corynebacterium | glutamicum | 21516 | | | | | | | |
| Corynebacterium | glutamicum | 21299 | | | | | | | |
| Corynebacterium | glutamicum | 21300 | | | | | | | |
| Corynebacterium | glutamicum | 39684 | | | | | | | |
| Corynebacterium | glutamicum | 21488 | | | | | | | |
| Corynebacterium | glutamicum | 21649 | | | | | | | |
| Corynebacterium | glutamicum | 21650 | | | | | | | |
| Corynebacterium | glutamicum | 19223 | | | | | | | |
| Corynebacterium | glutamicum | 13869 | | | | | | | |
| Corynebacterium | glutamicum | 21157 | | | | | | | |
| Corynebacterium | glutamicum | 21158 | | | | | | | |
| Corynebacterium | glutamicum | 21159 | | | | | | | |
| Corynebacterium | glutamicum | 21355 | | | | | | | |
| Corynebacterium | glutamicum | 31808 | | | | | | | |
| Corynebacterium | glutamicum | 21674 | | | | | | | |
| Corynebacterium | glutamicum | 21562 | | | | | | | |
| Corynebacterium | glutamicum | 21563 | | | | | | | |
| Corynebacterium | glutamicum | 21564 | | | | | | | |
| Corynebacterium | glutamicum | 21565 | | | | | | | |
| Corynebacterium | glutamicum | 21566 | | | | | | | |
| Corynebacterium | glutamicum | 21567 | | | | | | | |
| Corynebacterium | glutamicum | 21568 | | | | | | | |
| Corynebacterium | glutamicum | 21569 | | | | | | | |
| Corynebacterium | glutamicum | 21570 | | | | | | | |
| Corynebacterium | glutamicum | 21571 | | | | | | | |
| Corynebacterium | glutamicum | 21572 | | | | | | | |
| Corynebacterium | glutamicum | 21573 | | | | | | | |
| Corynebacterium | glutamicum | 21579 | | | | | | | |
| Corynebacterium | glutamicum | 19049 | | | | | | | |
| Corynebacterium | glutamicum | 19050 | | | | | | | |
| Corynebacterium | glutamicum | 19051 | | | | | | | |
| Corynebacterium | glutamicum | 19052 | | | | | | | |
| Corynebacterium | glutamicum | 19053 | | | | | | | |
| Corynebacterium | glutamicum | 19054 | | | | | | | |
| Corynebacterium | glutamicum | 19055 | | | | | | | |
| Corynebacterium | glutamicum | 19056 | | | | | | | |
| Corynebacterium | glutamicum | 19057 | | | | | | | |
| Corynebacterium | glutamicum | 19058 | | | | | | | |
| Corynebacterium | glutamicum | 19059 | | | | | | | |
| Corynebacterium | glutamicum | 19060 | | | | | | | |
| Corynebacterium | glutamicum | 19185 | | | | | | | |
| Corynebacterium | glutamicum | 13286 | | | | | | | |
| Corynebacterium | glutamicum | 21515 | | | | | | | |
| Corynebacterium | glutamicum | 21527 | | | | | | | |
| Corynebacterium | glutamicum | 21544 | | | | | | | |
| Corynebacterium | glutamicum | 21492 | | | | | | | |
| Corynebacterium | glutamicum | | | B8183 | | | | | |
| Corynebacterium | glutamicum | | | B8182 | | | | | |
| Corynebacterium | glutamicum | | | B12416 | | | | | |
| Corynebacterium | glutamicum | | | B12417 | | | | | |
| Corynebacterium | glutamicum | | | B12418 | | | | | |
| Corynebacterium | glutamicum | | | B11476 | | | | | |
| Corynebacterium | glutamicum | 21608 | | | | | | | |
| Corynebacterium | lilium | | P973 | | | | | | |
| Corynebacterium | nitrilophilus | 21419 | | | | 11594 | | | |
| Corynebacterium | spec. | | P4445 | | | | | | |
| Corynebacterium | spec. | | P4446 | | | | | | |
| Corynebacterium | spec. | 31088 | | | | | | | |
| Corynebacterium | spec. | 31089 | | | | | | | |
| Corynebacterium | spec. | 31090 | | | | | | | |
| Corynebacterium | spec. | 31090 | | | | | | | |
| Corynebacterium | spec. | 31090 | | | | | | | |
| Corynebacterium | spec. | 15954 | | | | | | | 20145 |
| Corynebacterium | spec. | 21857 | | | | | | | |
| Corynebacterium | spec. | 21862 | | | | | | | |
| Corynebacterium | spec. | 21863 | | | | | | | |

ATCC: American Type Culture Collection, Rockville, MD, USA
FERM: Fermentation Research Institute, Chiba, Japan
NRRL: ARS Culture Collection, Northern Regional Research Laboratory, Peoria, IL, USA
CECT: Coleccion Espanola de Cultivos Tipo, Valencia, Spain
NCIMB: National Collection of Industrial and Marine Bacteria Ltd., Aberdeen, UK
CBS: Centraalbureau voor Schimmelcultures, Baarn, NL
NCTC: National Collection of Type Cultures, London, UK
DSMZ: Deutsche Sammlung von Mikroorganismen und Zellkulturen, Braunschweig, Germany
For reference see Sugawara, H. et al. (1993) World directory of collections of cultures of microorganisms: Bacteria, fungi and yeasts (4^{th} edn), World federation for culture collections world data center on microorganisms, Saimata, Japen.

[0197] TABLE 4
ALIGNMENT RESULTS

| | | | | | | | % | |
|---|---|---|---|---|---|---|---|---|
| | | | | | | | homo- | |
| | length | | | | | | logy | Date of |
| ID # | (NT) | Genbank Hit | Length | Accession | Name of Genbank Hit | Source of Genbank Hit | (GAP) | Deposit |
| rxa00009 | 1023 | GB_IN1: CELZK563 | 29655 | U40061 | Caenorhabditis elegans cosmid ZK563. | Caenorhabditis elegans | 33,694 | 9-Nov-95 |
| | | GB_IN1: CELZK563 | 29655 | U40061 | Caenorhabditis elegans cosmid ZK563. | Caenorhabditis elegans | 36,040 | 9-Nov-95 |
| rxa00010 | 810 | GB_BA1: MTCY164 | 39150 | Z95150 | Mycobacterium tuberculosis H37Rv complete genome; segment 135/162. | Mycobacterium tuberculosis | 38,442 | 19-Jun-98 |
| | | GB_BA1: MTFTSX | 4068 | X70031 | M. tuberculosis ftsX and ftsE (partial) genes. | Mycobacterium tuberculosis | 63,158 | 06-MAR-1997 |
| | | GB_BA1: SHGCPIR | 107379 | X86780 | S. hygroscopicus gene cluster for polyketide immunosuppressant rapamycin. | Streptomyces hygroscopicus | 38,875 | 16-Aug-96 |
| rxa00024 | 1068 | GB_HTG1: CEY113G7_31 | 10000 | AL031113 | Caenorhabditis elegans chromosome V clone Y113G7, *** SEQUENCING | Caenorhabditis elegans | 36,217 | 12-Jan-99 |
| | | | | | IN PROGRESS ***, in unordered pieces. | | | |
| | | GB_HTG1: CEY113G7_31 | 10000 | AL031113 | Caenorhabditis elegans chromosome V clone Y113G7, *** SEQUENCING | Caenorhabditis elegans | 36,217 | 12-Jan-99 |
| | | | | | IN PROGRESS ***, in unordered pieces. | | | |
| | | GB_PL2: ATF1C12 | 111945 | AL022224 | Arabidopsis thaliana DNA chromosome 4, BAC clone F1C12 (ESSA | Arabidopsis thaliana | 35,824 | 20-Sep-99 |
| | | | | | project). | | | |
| rxa00048 | 1782 | GB_HTG3: AC008905 | 129915 | AC008905 | Homo sapiens chromosome 5 clone CITB-H1_2259l14, *** SEQUENCING | Homo sapiens | 38,826 | 3-Aug-99 |
| | | | | | IN PROGRESS ***, 40 unordered pieces. | | | |
| | | GB_HTG3: AC008905 | 129915 | AC008905 | Homo sapiens chromosome 5 clone CITB-H1_2259l14, *** SEQUENCING | Homo sapiens | 38,826 | 3-Aug-99 |
| | | | | | IN PROGRESS ***, 40 unordered pieces. | | | |
| | | GB_HTG3: AC008905 | 129915 | AC008905 | Homo sapiens chromosome 5 clone CITB-H1_2259l14, *** SEQUENCING | Homo sapiens | 37,379 | 3-Aug-99 |
| | | | | | IN PROGRESS ***, 40 unordered pieces. | | | |
| rxa00070 | 555 | GB_BA2: BPEFUR | 1003 | L31851 | Bordetella pertussis DNA repair protein (recN) gene, partial cds; iron | Bordetella pertussis | 45,756 | 17-Apr-95 |
| | | | | | regulatory protein (fur) gene, complete cds. | | | |
| | | GB_BA2: BPU11699 | 537 | U11699 | Bordetella pertussis ferric uptake regulator (fur) gene, complete cds. | Bordetella pertussis | 47,119 | 14-Jan-95 |
| | | GB_BA1: BTFURRECN | 1106 | Z48227 | B. pertussis fur gene for ferric uptake regulator and partial recN gene. | Bordetella pertussis | 45,756 | 10-Feb-95 |
| rxa00078 | 537 | GB_PR3: HUMCOL2A1Z3 | 1001 | L10347 | Human pro-alpha1 type II collagen (COL2A1) gene exons 1-54, complete | Homo sapiens | 39,010 | 3-Aug-95 |
| | | | | | cds. | | | |
| | | GB_HTG2: AC006721 | 135550 | AC006721 | Caenorhabditis elegans clone Y18H1, *** SEQUENCING IN PROGRESS | Caenorhabditis elegans | 40,661 | 23-Feb-99 |
| | | | | | ***, 5 unordered pieces. | | | |
| | | GB_HTG2: AC006721 | 135550 | AC006721 | Caenorhabditis elegans clone Y18H1, *** SEQUENCING IN PROGRESS | Caenorhabditis elegans | 40,661 | 23-Feb-99 |
| | | | | | ***, 5 unordered pieces. | | | |
| rxa00088 | 899 | GB_RO: MMCGT6 | 3009 | U48896 | Mus musculus UDP-galactose: ceramide galactosyltransferase (Cgt) gene, | Mus musculus | 35,455 | 1-Nov-96 |
| | | | | | exon 6 and complete cds. | | | |
| | | GB_RO: MMCGT6 | 3009 | U48896 | Mus musculus UDP-galactose: ceramide galactosyltransferase (Cgt) gene, | Mus musculus | 34,439 | 1-Nov-96 |
| | | | | | exon 6 and complete cds. | | | |
| rxa00100 | 723 | GB_PL1: CAC41C10 | 38874 | AL033501 | C. albicans cosmid Ca41C10. | Candida albicans | 36,222 | 10-Nov-98 |
| | | GB_PR4: AC007115 | 180821 | AC007115 | Homo sapiens chromosome 12 clone 917O5, complete sequence. | Homo sapiens | 33,050 | 17-Aug-99 |
| | | GB_PR4: AC007115 | 180821 | AC007115 | Homo sapiens chromosome 12 clone 917O5, complete sequence. | Homo sapiens | 34,993 | 17-Aug-99 |
| rxa00135 | 1377 | GB_BA1: MTCY373 | 35516 | Z73419 | Mycobacterium tuberculosis H37Rv complete genome; segment 57/162. | Mycobacterium tuberculosis | 60,639 | 17-Jun-98 |
| | | GB_BA1: MLU15186 | 36241 | U15186 | Mycobacterium leprae cosmid L471. | Mycobacterium leprae | 38,377 | 09-MAR-1995 |
| | | GB_BA1: MTMURAGEN | 1257 | X96711 | M. tuberculosis murA gene. | Mycobacterium tuberculosis | 61,575 | 22-MAR-1996 |
| rxa00143 | 1605 | GB_PAT: I92051 | 1107 | I92051 | Sequence 18 from Patent US 5726299. | Unknown. | 37,773 | 01-DEC-1998 |
| | | GB_PAT: I78761 | 1107 | I78761 | Sequence 17 from patent US 5693781. | Unknown. | 37,773 | 3-Apr-98 |
| | | GB_BA1: MTCY28 | 40163 | Z95890 | Mycobacterium tuberculosis H37Rv complete genome; segment 79/162. | Mycobacterium tuberculosis | 36,984 | 18-Jun-98 |
| rxa00177 | 1191 | GB_GSS14: AQ543786 | 345 | AQ543786 | RPCI-11-365L6.TV RPCI-11Homo sapiens genomic clone RPCI-11-365L6, | Homo sapiens | 38,551 | 19-MAY-1999 |
| | | | | | genomic survey sequence. | | | |
| | | GB_PL2: AF017646 | 3394 | AF017646 | Schizosaccharomyces pombe TFIIH subunit p47 (tfh47) gene, complete | Schizosaccharomyces | 38,122 | 17-MAR-1999 |
| | | | | | cds. | pombe | | |
| | | GB_PL1: SPCC1682 | 37404 | AL031525 | S. pombe chromosome III cosmid c1682. | Schizosaccharomyces | 33,983 | 14-DEC-1998 |
| | | | | | | pombe | | |
| rxa00178 | 1008 | GB_BA1: AB016258 | 2260 | AB016258 | Arthrobacter sp. gene for maleylacetate reductase and hydroxyquinol 1,2- | Arthrobacter sp. | 65,182 | 8-Sep-99 |
| | | | | | dioxygenase, partial and complete cds. | | | |
| | | GB_BA1: CGPUTP | 3791 | Y09163 | C. glutamicum putP gene. | Corynebacterium glutamicum | 38,806 | 8-Sep-97 |
| | | GB_STS: G05495 | 271 | G05495 | human STS WI-5918. | Homo sapiens | 39,925 | 8-Jun-95 |
| rxa00277 | 1684 | GB_BA1: MTCY22G10 | 35420 | Z84724 | Mycobacterium tuberculosis H37Rv complete genome; segment 21/162. | Mycobacterium tuberculosis | 39,976 | 17-Jun-98 |
| | | GB_IN1: CELT03F1 | 38643 | U88169 | Caenorhabditis elegans cosmid T03F1. | Caenorhabditis elegans | 35,127 | 7-Feb-97 |
| | | GB_IN2: CELK02A2 | 38261 | U23171 | Caenorhabditis elegans cosmid K02A2. | Caenorhabditis elegans | 36,166 | 21-MAY-1999 |
| rxa00372 | 1200 | GB_IN2: AC005452 | 79333 | AC005452 | Drosophila melanogaster, chromosome 2R, region 43B2-43C2, P1 clone | Drosophila melanogaster | 37,006 | 26-Nov-98 |
| | | | | | DS07185, complete sequence. | | | |
| | | GB_IN2: AC005452 | 79333 | AC005452 | Drosophila melanogaster, chromosome 2R, region 43B2-43C2, P1 clone | Drosophila melanogaster | 34,907 | 26-Nov-98 |
| | | | | | DS07185, complete sequence. | | | |
| | | GB_IN1: CELW03F8 | 34766 | AF039041 | Caenorhabditis elegans cosmid W03F8. | Caenorhabditis elegans | 40,712 | 1-Jan-98 |
| rxa00389 | 1683 | GB_IN1: AB010703 | 772 | AB010703 | Theileria sp. gene for major piroplasm surface protein, partial cds, isolate | Theileria sp. | 40,285 | 18-Apr-98 |
| | | | | | Kamphaeng Saen. | | | |
| | | GB_BA1: LLU08911 | 619 | U08911 | Lactobacillus leichmannii putative D-alanine: D-alanine ligase (ddl) gene, | Lactobacillus leichmannii | 40,194 | 16-Feb-96 |
| | | | | | partial cds. | | | |
| | | GB_IN1: TPMS1 | 822 | Z48740 | T. parva Tpms1 gene for merozoite surface glycoprotein. | Theileria parva | 38,902 | 15-MAY-1995 |
| rxa00467 | 792 | GB_PR4: DJ293M10 | 202267 | AF111167 | Homo sapiens jun dimerization protein gene, partial cds; cfos gene, | Homo sapiens | 37,995 | 7-Apr-99 |
| | | | | | complete cds; and unknown gene. | | | |
| | | GB_PR4: DJ293M10 | 202267 | AF111167 | Homo sapiens jun dimerization protein gene, partial cds; cfos gene, | Homo sapiens | 36,639 | 7-Apr-99 |
| | | | | | complete cds; and unknown gene. | | | |
| | | GB_IN1: CEW01C9 | 21493 | Z49969 | Caenorhabditis elegans cosmid W01C9, complete sequence. | Caenorhabditis elegans | 37,980 | 23-Nov-98 |
| rxa00499 | 1404 | GB_PR4: AC007206 | 42732 | AC007206 | Homo sapiens chromosome 19, cosmid R27370, complete sequence. | Homo sapiens | 34,982 | 4-Apr-99 |
| | | GB_EST26: AI344735 | 462 | AI344735 | qp05a10.x1 NCI_CGAP_Kid5Homo sapiens cDNA clone IMAGE: 1917114 | Homo sapiens | 42,675 | 2-Feb-99 |
| | | | | | 3′ similar to gb: M15800 T-LYMPHOCYTE MATURATION-ASSOCIATED | | | |
| | | | | | PROTEIN (HUMAN);, mRNA sequence. | | | |
| | | GB_PR4: AC006479 | 161837 | AC006479 | Homo sapiens clone DJ1051J04, complete sequence. | Homo sapiens | 38,462 | 11-Nov-99 |
| rxa00508 | 1206 | GB_HTG2: AC007111 | 84245 | AC007111 | Homo sapiens chromosome 16 clone 1-8F, *** SEQUENCING IN | Homo sapiens | 37,931 | 18-MAR-1999 |
| | | | | | PROGRESS ***, 2 ordered pieces. | | | |
| | | GB_HTG2: AC007111 | 84245 | AC007111 | Homo sapiens chromosome 16 clone 1-8F, *** SEQUENCING IN | Homo sapiens | 37,931 | 18-MAR-1999 |
| | | | | | PROGRESS ***, 2 ordered pieces. | | | |
| | | GB_VI: AF141890 | 1791 | AF141890 | Columbid herpesvirus 1 DNA-dependent DNA polymerase gene, partial cds. | columbid herpesvirus 1 | 39,401 | 7-Jul-99 |
| rxa00569 | 1149 | GB_PAT: I15213 | 3728 | I15213 | Sequence 1 from patent US 5460951. | Unknown. | 41,244 | 2-Apr-96 |
| | | GB_PAT: E07353 | 3728 | E07353 | cDNA encoding bone-related carboxypeptidase-like protein, OSF-5. | Mus sp. | 41,244 | 29-Sep-97 |
| | | GB_HTG1: CEY70G10 | 152184 | AL020987 | Caenorhabditis elegans chromosome III clone Y70G10, *** SEQUENCING | Caenorhabditis elegans | 34,148 | 12-DEC-1997 |
| | | | | | IN PROGRESS ***, in unordered pieces. | | | |
| rxa00612 | 1077 | GB_HTG2: AC005020 | 177756 | AC005020 | Homo sapiens clone GS259H13, *** SEQUENCING IN PROGRESS ***, 4 | Homo sapiens | 34,551 | 12-Jun-98 |
| | | | | | unordered pieces. | | | |
| | | GB_HTG2: AC005020 | 177756 | AC005020 | Homo sapiens clone GS259H13, *** SEQUENCING IN PROGRESS ***, 4 | Homo sapiens | 34,551 | 12-Jun-98 |
| | | | | | unordered pieces. | | | |
| | | GB_HTG2: AC005020 | 177756 | AC005020 | Homo sapiens clone GS259H13, *** SEQUENCING IN PROGRESS ***, 4 | Homo sapiens | 37,628 | 12-Jun-98 |
| | | | | | unordered pieces. | | | |
| rxa00615 | 705 | GB_GSS15: AQ622921 | 517 | AQ622921 | HS_5351_A1_A08_T7A RPCI-11 Human Male BAC LibraryHomo sapiens | Homo sapiens | 38,254 | 16-Jun-99 |
| | | | | | genomic clone Plate = 927 Col = 15 Row = A, genomic survey sequence. | | | |
| | | GB_GSS3: B36703 | 432 | B36703 | HS-1041-B1-B12-MR.abi CIT Human Genomic Sperm Library CHomo | Homo sapiens | 44,981 | 17-OCT-1997 |
| | | | | | sapiens genomic clone Plate = CT 823 Col = 23 Row = D, genomic survey | | | |
| | | | | | sequence. | | | |
| | | GB_EST25: AI245926 | 572 | AI245926 | qk33c08.x1 NCI_CGAP_Co8Homo sapiens cDNA clone IMAGE: 1870766 | Homo sapiens | 38,902 | 28-Jan-99 |
| | | | | | 3′ similar to SW: COPG_BOVIN P53620 COATOMER GAMMA SUBUNIT;, | | | |
| | | | | | mRNA sequence. | | | |
| rxa00621 | 906 | GB_EST1: D36491 | 360 | D36491 | CELK033GYF Yuji Kohara unpublished cDNACaenorhabditis elegans | Caenorhabditis elegans | 40,390 | 8-Aug-94 |
| | | | | | cDNA clone yk33g11 5′, mRNA sequence. | | | |
| | | GB_IN2: CELC16A3 | 34968 | U41534 | Caenorhabditis elegans cosmid C16A3. | Caenorhabditis elegans | 35,477 | 18-MAY-1999 |
| | | GB_HTG3: AC009311 | 160198 | AC009311 | Homo sapiens clone NH0311L03, *** SEQUENCING IN PROGRESS ***, 3 | Homo sapiens | 38,636 | 13-Aug-99 |
| | | | | | unordered pieces. | | | |
| rxa00622 | 1539 | GB_BA1: AB004795 | 3039 | AB004795 | Pseudomonas sp. gene for dipeptidyl aminopeptidase, complete cds. | Pseudomonas sp. | 54,721 | 5-Feb-99 |
| | | GB_BA1: MBOPII | 2392 | D38405 | Moraxella lacunata gene for protease II, complete cds. | Moraxella lacunata | 50,167 | 8-Feb-99 |
| | | GB_IN2: AF078916 | 2960 | AF078916 | Trypanosoma brucei brucei oligopeptidase B (opb) gene, complete cds. | Trypanosoma brucei brucei | 48,076 | 08-OCT-1999 |
| rxa00639 | 978 | GB_BA2: AF043741 | 1223 | AF043741 | Rhodococcus rhodochrous catechol 1,2-dioxygenase (catA) gene, complete | Rhodococcus rhodochrous | 66,940 | 27-Aug-98 |
| | | | | | cds. | | | |
| | | GB_BA1: D83237 | 1626 | D83237 | Rhodococcus erythropolis DNA for catechol 1,2-dioxgenase, complete cds. | Rhodococcus erythropolis | 65,440 | 1-Sep-99 |
| | | GB_BA1: ROX99622 | 7224 | X99622 | Rhodococcus opacus catR, catA, catB, catC genes and five ORFs. | Rhodococcus opacus | 63,617 | 24-Sep-97 |
| rxa00641 | 1614 | GB_BA2: AF134348 | 5000 | AF134348 | Pseudomonas putida plasmid pDK1 toluate 1,2 dioxygenase subunit | Pseudomonas putida | 59,863 | 20-MAY-1999 |
| | | | | | (xylX), toluate 1,2 dioxygenase subunit (xylY), and toluate 1,2 dioxygenase | | | |
| | | | | | subunit (xylZ) genes, complete cds; and 1,2-dihydroxycyclohexa-3,5-diene | | | |
| | | | | | carboxylate dehydrogenase (xylL) gene, partial cds. | | | |
| | | GB_BA1: PWWXYL | 9037 | M64747 | Pseudomonas putida plasmid pWW0 meta operon, 5′ genes. | Plasmid pWW0 | 59,588 | 26-Apr-93 |
| | | GB_BA1: PCCBDABC | 3548 | X79076 | P. cepacia (2CBS) cbdA, cbdB and cbdC genes. | Burkholderia cepacia | 55,410 | 3-Apr-97 |
| rxa00642 | 615 | GB_BA2: AF134348 | 5000 | AF134348 | Pseudomonas putida plasmid pDK1 toluate 1,2 dioxygenase subunit (xylX), | Pseudomonas putida | 60,920 | 20-MAY-1999 |
| | | | | | toluate 1,2 dioxygenase subunit (xylY), and toluate 1,2 dioxygenase subunit | | | |
| | | | | | (xylZ) genes, complete cds; and 1,2-dihydroxycyclohexa-3,5-diene | | | |
| | | | | | carboxylate dehydrogenase (xylL) gene, partial cds. | | | |
| | | GB_BA1: PWWXYL | 9037 | M64747 | Pseudomonas putida plasmid pWW0 meta operon, 5′ genes. | Plasmid pWW0 | 58,756 | 26-Apr-93 |
| | | GB_GSS11: AQ274007 | 637 | AQ274007 | nbxb0032I07f CUGI Rice BAC Library Oryza sativa genomic clone | Oryza sativa | 41,390 | 3-Nov-98 |
| | | | | | nbxb0032I07f, genomic survey sequence. | | | |
| rxa00643 | 1659 | GB_BA2: AF134348 | 5000 | AF134348 | Pseudomonas putida plasmid pDK1 toluate 1,2 dioxygenase subunit (xylX), | Pseudomonas putida | 53,871 | 20-MAY-1999 |
| | | | | | toluate 1,2 dioxygenase subunit (xylY), and toluate 1,2 dioxygenase subunit | | | |
| | | | | | (xylZ) genes, complete cds; and 1,2-dihydroxycyclohexa-3,5-diene | | | |
| | | | | | carboxylate dehydrogenase (xylL) gene, partial cds. | | | |
| | | GB_BA1: PWWXYL | 9037 | M64747 | Pseudomonas putida plasmid pWW0 meta operon, 5′ genes. | Plasmid pWW0 | 52,603 | 26-Apr-93 |
| | | GB_EST22: AI020666 | 328 | AI020666 | ua97f07.r1 Soares mouse mammary gland NbMMG Mus musculus cDNA | Mus musculus | 43,865 | 16-Jun-98 |
| | | | | | clone IMAGE: 1365445 5′ similar to SW: DUS7_RAT Q63340 DUAL | | | |
| | | | | | SPECIFICITY PROTEIN PHOSPHATASE 7;, mRNA sequence. | | | |
| rxa00644 | 951 | GB_BA1: PWWXYL | 9037 | M64747 | Pseudomonas putida plasmid pWW0 meta operon, 5′ genes. | Plasmid pWW0 | 55,626 | 26-Apr-93 |
| | | GB_BA2: AF134348 | 5000 | AF134348 | Pseudomonas putida plasmid pDK1 toluate 1,2 dioxygenase subunit (xylX), | Pseudomonas putida | 50,410 | 20-MAY-1999 |
| | | | | | toluate 1,2 dioxygenase subunit (xylY), and toluate 1,2 dioxygenase subunit | | | |
| | | | | | (xylZ) genes, complete cds; and 1,2-dihydroxycyclohexa-3,5-diene | | | |
| | | | | | carboxylate dehydrogenase (xylL) gene, partial cds. | | | |
| | | GB_EST22: AI038396 | 438 | AI038396 | ox21g10.x1 Soares_fetal_liver_spleen_1NFLS_S1Homo sapiens cDNA | Homo sapiens | 40,138 | 28-Aug-98 |
| | | | | | clone IMAGE: 1657026 3′ similar to contains Alu repetitive element; contains | | | |
| | | | | | element L1 repetitive element;, mRNA sequence. | | | |
| rxa00658 | 816 | GB_EST16: C26090 | 414 | C26090 | C26090 Rice callus cDNAOryza sativa cDNA clone C11617_1A, mRNA | Oryza sativa | 40,636 | 6-Aug-97 |
| | | | | | sequence. | | | |
| | | GB_EST16: C26090 | 414 | C26090 | C26090 Rice callus cDNAOryza sativa cDNA clone C11617_1A, mRNA | Oryza sativa | 38,406 | 6-Aug-97 |
| | | | | | sequence. | | | |
| rxa00663 | 1497 | GB_BA1: MTV017 | 67200 | AL021897 | Mycobacterium tuberculosis H37Rv complete genome; segment 48/162. | Mycobacterium tuberculosis | 57,976 | 24-Jun-99 |
| | | GB_BA1: MLCB1222 | 34714 | AL049491 | Mycobacterium leprae cosmid B1222. | Mycobacterium leprae | 39,669 | 27-Aug-99 |
| | | GB_HTG2: AC007482 | 155357 | AC007482 | Homo sapiens clone hRPK.56_A_1, *** SEQUENCING IN PROGRESS ***, | Homo sapiens | 36,154 | 05-MAY-1999 |
| | | | | | 6 unordered pieces. | | | |
| rxa00675 | 915 | GB_BA1: SC3C8 | 33095 | AL023861 | Streptomyces coelicolor cosmid 3C8. | Streptomyces coelicolor | 36,836 | 15-Jan-99 |
| | | GB_PR3: AC005736 | 215441 | AC005736 | Homo sapiens chromosome 16, BAC clone 462G18 (LANL), complete | Homo sapiens | 42,027 | 01-OCT-1998 |
| | | | | | sequence. | | | |
| | | GB_IN2: AC005719 | 188357 | AC005719 | Drosophila melanogaster, chromosome 2L, region 38A5-38B4, BAC clone | Drosophila melanogaster | 35,531 | 27-OCT-1999 |
| | | | | | BACR48M05, complete sequence. | | | |
| rxa00762 | 999 | GB_HTG2: HSJ473J16 | 203460 | AL109942 | Homo sapiens chromosome 6 clone RP3-473J16 map q25.3-26, *** | Homo sapiens | 37,295 | 03-DEC-1999 |
| | | | | | SEQUENCING IN PROGRESS ***, in unordered pieces. | | | |
| | | GB_HTG2: HSJ473J16 | 203460 | AL109942 | Homo sapiens chromosome 6 clone RP3-473J16 map q25.3-26, *** | Homo sapiens | 37,295 | 03-DEC-1999 |
| | | | | | SEQUENCING IN PROGRESS ***, in unordered pieces. | | | |
| | | GB_PR2: HSU91327 | 129252 | U91327 | Human chromosome 12p15 BAC clone CIT987SK-99D8 complete | Homo sapiens | 35,650 | 21-Aug-97 |
| | | | | | sequence. | | | |
| rxa00772 | 1629 | GB_BA2: AF010184 | 1494 | AF010184 | Pseudomonas aeruginosa coenzyme A transferase PsecoA (psecoA) gene, | Pseudomonas aeruginosa | 56,472 | 18-Jul-98 |
| | | | | | complete cds. | | | |
| | | GB_PAT: I92043 | 713 | I92043 | Sequence 10 from patent US 5726299. | Unknown. | 92,701 | 01-DEC-1998 |
| | | GB_PAT: I78754 | 713 | I78754 | Sequence 10 from patent US 5693781. | Unknown. | 92,701 | 3-Apr-98 |
| rxa00778 | 1248 | GB_BA1: MTPST2GN | 1347 | Z48056 | M. tuberculosis PstS-2 gene. | Mycobacterium tuberculosis | 47,791 | 24-Apr-99 |
| | | GB_BA1: D90907 | 132419 | D90907 | Synechocystis sp. PCC6803 complete genome, 9/27, 1056467-1188885. | Synechocystis sp. | 35,536 | 7-Feb-99 |
| | | GB_BA1: D90907 | 132419 | D90907 | Synechocystis sp. PCC6803 complete genome, 9/27, 1056467-1188885. | Synechocystis sp. | 38,006 | 7-Feb-99 |
| rxa00787 | 2025 | GB_PL1: SCX11RA | 36849 | X91258 | S. cerevisiae DNA from chromosome XII right arm including ACE2, CKI1, | Saccharomyces cerevisiae | 36,122 | 13-OCT-1995 |
| | | | | | PDC5, SLS1, PUT1 and tRNA-Asp genes. | | | |
| | | GB_PL2: YSCL9606 | 29154 | U53881 | Saccharomyces cerevisiae chromosome XII cosmid 9606. | Saccharomyces cerevisiae | 36,122 | 25-OCT-1997 |
| | | GB_PL1: SCX11RA | 36849 | X91258 | S. cerevisiae DNA from chromosome XII right arm including ACE2, CKI1, | Saccharomyces cerevisiae | 37,198 | 13-OCT-1995 |
| | | | | | PDC5, SLS1, PUT1 and tRNA-Asp genes. | | | |
| rxa00792 | 1320 | GB_PR4: AC004841 | 132072 | AC004841 | Homo sapiens PAC clone DJ0607J23 from 7q21.2-q31.1, complete | Homo sapiens | 37,452 | 18-MAR-1999 |
| | | | | | sequence. | | | |
| | | GB_HTG2: AC006706 | 180664 | AC006706 | Caenorhabditis elegans clone Y110A2, *** SEQUENCING IN PROGRESS | Caenorhabditis elegans | 34,824 | 23-Feb-99 |
| | | | | | ***, 4 unordered pieces. | | | |
| | | GB_HTG2: AC006706 | 180664 | AC006706 | Caenorhabditis elegans clone Y110A2, *** SEQUENCING IN PROGRESS | Caenorhabditis elegans | 34,824 | 23-Feb-99 |
| | | | | | ***, 4 unordered pieces. | | | |
| rxa00857 | 1313 | GB_BA1: MTV002 | 56414 | AL008967 | Mycobacterium tuberculosis H37Rv complete genome; segment 122/162. | Mycobacterium tuberculosis | 38,080 | 17-Jun-98 |
| | | GB_BA1: MSGY154 | 40221 | AD000002 | Mycobacterium tuberculosis sequence from clone y154. | Mycobacterium tuberculosis | 68,345 | 03-DEC-1996 |
| | | GB_BA1: MLCB33 | 42224 | Z94723 | Mycobacterium leprae cosmid B33. | Mycobacterium leprae | 38,824 | 24-Jun-97 |
| rxa00877 | 1788 | GB_PAT: I92050 | 567 | I92050 | Sequence 17 from patent US 5726299. | Unknown. | 62,787 | 01-DEC-1998 |
| | | GB_PAT: I78760 | 567 | I78760 | Sequence 16 from patent US 5693781. | Unknown. | 62,787 | 3-Apr-98 |
| | | GB_BA2: AE000426 | 10240 | AE000426 | Escherichia coli K-12 MG1655 section 316 of 400 of the complete genome. | Escherichia coli | 36,456 | 12-Nov-98 |
| rxa00888 | 1140 | GB_BA1: MTCY27 | 27548 | Z95208 | Mycobacterium tuberculosis H37Rv complete genome; segment 104/162. | Mycobacterium tuberculosis | 40,165 | 17-Jun-98 |
| | | GB_BA1: U00016 | 42931 | U00016 | Mycobacterium leprae cosmid B1937. | Mycobacterium leprae | 58,444 | 01-MAR-1994 |
| | | GB_BA1: ECU82598 | 136742 | U82598 | Escherichia coli genomic sequence of minutes 9 to 12. | Escherichia coli | 37,876 | 15-Jan-97 |
| rxa00892 | 1017 | GB_BA2: AE000817 | 13157 | AE000817 | Methanobacterium thermoautotrophicum from bases 251486 to 264642 | Methanobacterium | 36,710 | 15-Nov-97 |
| | | | | | (section 23 of 148) of the complete genome. | thermoautotrophicum | | |
| | | GB_EST29: AI620549 | 239 | AI620549 | tu95b07.x1 NCI_CGAP_Gas4Homo sapiens cDNA clone IMAGE: 2258773 | Homo sapiens | 38,075 | 21-Apr-99 |
| | | | | | 3′ similar to gb: X60708_rna1 DIPEPTIDYL PEPTIDASE IV (HUMAN);, | | | |
| | | | | | mRNA sequence. | | | |
| | | GB_BA2: AE000817 | 13157 | AE000817 | Methanobacterium thermoautotrophicum from bases 251486 to 264642 | Methanobacterium | 35,650 | 15-Nov-97 |
| | | | | | (section 23 of 148) of the complete genome. | thermoautotrophicum | | |
| rxa00897 | 1128 | GB_PR3: HS246D7 | 28011 | AL031843 | Human DNA sequence from clone 246D7 on chromosome 22q13.1-13.33. | Homo sapiens | 38,724 | 23-Nov-99 |
| | | | | | Contains ESTs, a GSS and an STS, complete sequence. | | | |
| | | GB_PR3: HSDJ185D5 | 24387 | AL118498 | Human DNA sequence from clone 185D5 on chromosome 22, complete | Homo sapiens | 37,021 | 23-Nov-99 |
| | | | | | sequence. | | | |
| | | GB_PR3: HS246D7 | 28011 | AL031843 | Human DNA sequence from clone 246D7 on chromosome 22q13.1-13.33. | Homo sapiens | 36,054 | 23-Nov-99 |
| | | | | | Contains ESTs, a GSS and an STS, complete sequence. | | | |
| rxa00944 | 1095 | GB_BA1: ECU68759 | 1531 | U68759 | Enterobacter cloacae pentaerythritol tetranitrate reductase (onr) gene, | Enterobacter cloacae | 43,041 | 14-DEC-1996 |
| | | | | | complete cds. | | | |
| | | GB_PAT: A59288 | 1531 | A59288 | Sequence 1 from Patent WO9703201. | unidentified | 43,041 | 06-MAR-1998 |
| | | GB_EST23: AI099394 | 601 | AI099394 | ue32a09.y1 Sugano mouse liver mlia Mus musculus cDNA clone | Mus musculus | 37,225 | 20-Aug-98 |
| | | | | | IMAGE: 1482040 5′ similar to gb: U21301 Mus musculus c-mer tyrosine | | | |
| | | | | | kinase receptor mRNA, complete (MOUSE);, mRNA sequence. | | | |
| rxa00964 | 1248 | GB_HTG6: AC009794 | 152794 | AC009794 | Homo sapiens chromosome 4 clone RP11-343C10 map 4, *** | Homo sapiens | 34,762 | 03-DEC-1999 |
| | | | | | SEQUENCING IN PROGRESS ***, 33 unordered pieces. | | | |
| | | GB_HTG6: AC009794 | 152794 | AC009794 | Homo sapiens chromosome 4 clone RP11-343C10 map 4, *** | Homo sapiens | 35,708 | 03-DEC-1999 |
| | | | | | SEQUENCING IN PROGRESS ***, 33 unordered pieces. | | | |
| rxa00982 | 1629 | GB_BA1: BLARGS | 2501 | Z21501 | B. lactofermentum argS and lysA genes for arginyl-tRNA synthetase and | Corynebacterium glutamicum | 39,003 | 28-DEC-1993 |
| | | | | | diaminopimelate decarboxylase (partial). | | | |
| | | GB_BA1: CGXLYSA | 2344 | X54740 | Corynebacterium glutamicum argS-lysA operon gene for the upstream | Corynebacterium glutamicum | 41,435 | 30-Jun-93 |
| | | | | | region of the arginyl-tRNA synthetase and diaminopimelate decarboxylase | | | |
| | | | | | (EC 4.1.1.20). | | | |
| | | GB_PAT: E14508 | 3579 | E14508 | DNA encoding Brevibacterium diaminopimelic acid decarboxylase and | Corynebacterium glutamicum | 40,566 | 28-Jul-99 |
| | | | | | arginyl-tRNA synthase. | | | |
| rxa01014 | 2724 | GB_BA1: MTV008 | 63033 | AL021246 | Mycobacterium tuberculosis H37Rv complete genome; segment 108/162. | Mycobacterium tuberculosis | 56,167 | 17-Jun-98 |
| | | GB_BA1: STMAMPEPN | 2849 | L23172 | Streptomyces lividans aminopeptidase N gene, complete cds. | Streptomyces lividans | 57,067 | 18-MAY-1994 |
| | | GB_BA1: SC7H2 | 42655 | AL109732 | Streptomyces coelicolor cosmid 7H2. | Streptomyces coelicolor | 37,551 | 2-Aug-99 |
| | | | | | | A3(2) | | |
| rxa01022 | 1203 | GB_PAT: A68384 | 1080 | A68384 | Sequence 1 from Patent WO9748809. | Mycobacterium avium | 56,913 | 06-MAY-1999 |
| | | GB_BA2: AF077728 | 1346 | AF077728 | Mycobacterium smegmatis D-alanine: D-alanine ligase gene, complete cds. | Mycobacterium smegmatis | 57,203 | 1-Jan-99 |
| rxa01055 | | GB_BA1: MSGB1723CS | 38477 | L78825 | Mycobacterium leprae cosmid B1723 DNA sequence. | Mycobacterium leprae | 54,599 | 15-Jun-96 |
| rxa01056 | 1023 | GB_BA2: AE001715 | 11086 | AE001715 | Thermotoga maritima section 27 of 136 of the complete genome. | Thermotoga maritima | 39,034 | 2-Jun-99 |
| | | GB_EST38: AW046857 | 161 | AW046857 | UI-M-BH1-akl-a-04-0-UI.s1 NIH_BMAP_M_S2Mus musculus cDNA clone | Mus musculus | 45,963 | 18-Sep-99 |
| | | | | | UI-M-BH1-akl-a-04-0-UI 3′, mRNA sequence. | | | |
| | | GB_EST38: AW049435 | 244 | AW049435 | UI-M-BH1-ams-b-01-0-UI.s1 NIH_BMAP_M_S2Mus musculus cDNA clone | Mus musculus | 40,984 | 18-Sep-99 |
| | | | | | UI-M-BH1-ams-b-01-0-UI 3′, mRNA sequence. | | | |
| rxa01057 | 1626 | GB_PL1: LPAJ5046 | 656 | AJ225046 | Lycopersicon peruvianum mRNA for Hsp20.1 protein. | Lycopersicon peruvianum | 37,117 | 22-Jul-98 |
| | | GB_PL2: SPAC806 | 22870 | AL117212 | S. pombe chromosome I cosmid c806. | Schizosaccharomyces | 38,211 | 24-Nov-99 |
| | | | | | | pombe | | |
| | | GB_PL2: SPAC806 | 22870 | AL117212 | S. pombe chromosome I cosmid c806. | Schizosaccharomyces | 36,934 | 24-Nov-99 |
| | | | | | | pombe | | |
| rxa01082 | 783 | GB_BA2: AF112535 | 4363 | AF112535 | Corynebacterium glutamicum putative glutaredoxin NrdH (nrdH), NrdI (nrdI), | Corynebacterium glutamicum | 99,794 | 5-Aug-99 |
| | | | | | and ribonucleotide reductase alpha-chain (nrdE) genes, complete cds. | | | |
| | | GB_PL2: TAE237897 | 8020 | AJ237897 | Triticum aestivum sbe1 gene, exons 1-14. | Triticum aestivum | 37,132 | 1-Nov-99 |
| | | GB_PL2: AF076680 | 10499 | AF076680 | Aegilops tauschii starch branching enzyme-I (SBE-I) gene, complete cds. | Aegilops tauschii | 38,651 | 14-MAY-1999 |
| rxa01113 | 260 | GB_VI: ASU02468 | 11424 | U02468 | African swine fever virus BA71V (A489R, A280R, A505R, A498R, A528R, | African swine fever virus | 31,923 | 28-Apr-94 |
| | | | | | A506R, and A542R) genes, complete cds. | | | |
| | | GB_VI: ASU18466 | 170101 | U18466 | African swine fever virus, complete genome. | African swine fever virus | 31,923 | 22-Apr-95 |
| | | GB_GSS5: AQ752779 | 1647 | AQ752779 | HS_5569_B1_D02_SP6 RPCI-11 Human Male BAC LibraryHomo sapiens | Homo sapiens | 37,154 | 19-Jul-99 |
| | | | | | genomic clone Plate = 1145 Col = 3 Row = H, genomic survey sequence. | | | |
| rxa01115 | 876 | GB_BA1: AB014757 | 6057 | AB014757 | Pseudomonas sp. 61-3 genes for PhbR, acetoacetyl-CoA reductase, beta- | Pseudomonas sp. 61-3 | 40,850 | 26-DEC-1998 |
| | | | | | ketothiolase and PHB synthase, complete cds. | | | |
| | | GB_IN2: DMU60591 | 5630 | U60591 | Drosophila melanogaster kuzbanian (kuz) mRNA, complete cds. | Drosophila melanogaster | 37,326 | 10-Sep-96 |
| | | GB_RO: MMMMP10 | 1744 | Y13185 | Mus musculus mRNA for stromelysin-2. | Mus musculus | 35,877 | 14-Jan-98 |
| rxa01116 | 735 | GB_BA1: SC4C6 | 30941 | AL079355 | Streptomyces coelicolor cosmid 4C6. | Streptomyces coelicolor | 40,616 | 21-Jun-99 |
| | | GB_BA2: AF109386 | 6551 | AF109386 | Streptomyces sp. 2065 protocatechuaic acid catabolic gene cluster, | Streptomyces sp. 2065 | 64,099 | 06-DEC-1999 |
| | | | | | complete sequence. | | | |
| | | GB_BA1: MTCY07A7 | 23967 | Z95556 | Mycobacterium tuberculosis H37Rv complete genome; segment 109/162. | Mycobacterium tuberculosis | 41,716 | 17-Jun-98 |
| rxa01117 | 864 | GB_BA2: AF109386 | 6551 | AF109386 | Streptomyces sp. 2065 protocatechuaic acid catabolic gene cluster, | Streptomyces sp. 2065 | 62,116 | 06-DEC-1999 |
| | | | | | complete sequence. | | | |
| | | GB_BA2: AF003947 | 5475 | AF003947 | Rhodococcus opacus succinyl CoA: 3-oxoadipate CoA transferase subunit | Rhodococcus opacus | 36,712 | 12-MAR-1998 |
| | | | | | homolog (pcal') gene, partial cds, protocatechuate dioxygenase beta | | | |
| | | | | | subunit (pcaH), protocatechuate dioxygenase alpha subunit (pcaG), 3- | | | |
| | | | | | carboxy-cis,cis-muconate cycloisomerase homolog (pcaB), 3-oxoadipate | | | |
| | | | | | enol-lactone hydrolase/4-carboxymuconolactone decarboxylase (pcaL) and | | | |
| | | | | | PcaR (pcaR) genes, complete cds, and 3-oxoadipyl CoA thiolase homolog | | | |
| | | | | | (pcaF') gene, partial cds. | | | |
| | | GB_BA1: XCLPSIJ | 2578 | Y11313 | X. campestris lpsI, lpsJ, xanA genes and orfX. | Xanthomonas campestris | 39,833 | 20-Jan-98 |
| rxa01120 | 1401 | GB_BA1: MTV008 | 63033 | AL021246 | Mycobacterium tuberculosis H37Rv complete genome; segment 108/162. | Mycobacterium tuberculosis | 36,715 | 17-Jun-98 |
| | | GB_BA1: CAJ10321 | 6710 | AJ010321 | Caulobacter crescentus partial tig gene and clpP, cicA, clpX, lon genes. | Caulobacter crescentus | 63,311 | 01-OCT-1998 |
| | | GB_BA2: AF150957 | 4440 | AF150957 | Azospirillum brasilense trigger factor (tig), heat-shock protein ClpP (clpP), | Azospirillum brasilense | 60,613 | 7-Jun-99 |
| | | | | | and heat-shock protein ClpX (clpX) genes, complete cds; and Lon protease | | | |
| | | | | | (lon) gene, partial cds. | | | |
| rxa01126 | 583 | GB_HTG3: AC009199 | 66498 | AC009199 | Drosophila melanogaster chromosome 2 clone BACR10J23 (D1024) RPCI- | Drosophila melanogaster | 35,294 | 20-Sep-99 |
| | | | | | 98 10.J.23 map 37B-37B strain y; cn bw sp, *** SEQUENCING IN | | | |
| | | | | | PROGRESS ***, 79 unordered pieces. | | | |
| | | GB_HTG3: AC009199 | 66498 | AC009199 | Drosophila melanogaster chromosome 2 clone BACR10J23 (D1024) RPCI- | Drosophila melanogaster | 35,294 | 20-Sep-99 |
| | | | | | 98 10.J.23 map 37B-37B strain y; cn bw sp, *** SEQUENCING IN | | | |
| | | | | | PROGRESS ***, 79 unordered pieces. | | | |
| | | GB_PL1: AB016880 | 81284 | AB016880 | Arabidopsis thaliana genomic DNA, chromosome 5, P1 clone: MTG10, | Arabidopsis thaliana | 34,477 | 20-Nov-99 |
| | | | | | complete sequence. | | | |
| rxa01181 | 980 | GB_BA1: MLCB22 | 40281 | Z98741 | Mycobacterium leprae cosmid B22. | Mycobacterium leprae | 61,570 | 22-Aug-97 |
| | | GB_BA1: MTCY190 | 34150 | Z70283 | Mycobacterium tuberculosis H37Rv complete genome; segment 98/162. | Mycobacterium tuberculosis | 60,434 | 17-Jun-98 |
| | | GB_BA1: SC5F7 | 40024 | AL096872 | Streptomyces coelicolor cosmid 5F7. | Streptomyces coelicolor | 57,011 | 22-Jul-99 |
| | | | | | A3(2) | | | |
| rxa01236 | 1068 | GB_EST3: H01832 | 381 | H01832 | yj28c11.s1 Soares placenta Nb2HPHomo sapiens cDNA clone | Homo sapiens | 41,406 | 19-Jun-95 |
| | | | | | IMAGE: 150068 3′, mRNA sequence. | | | |
| | | GB_PR4: AC004850 | 105891 | AC004850 | Homo sapiens PAC clone DJ0665C04 from 7p14-p13, complete sequence. | Homo sapiens | 37,428 | 26-Feb-99 |
| | | GB_GSS11: AQ304150 | 528 | AQ304150 | HS_3208_A1_D12_T7 CIT Approved Human Genomic Sperm Library D | Homo sapiens | 37,421 | 16-DEC-1998 |
| | | | | | Homo sapiens genomic clone Plate = 3208 Col = 23 Row = G, genomic survey | | | |
| | | | | | sequence. | | | |
| rxa01254 | 1392 | GB_BA1: MTV025 | 121125 | AL022121 | Mycobacterium tuberculosis H37Rv complete genome; segment 155/162. | Mycobacterium tuberculosis | 58,315 | 24-Jun-99 |
| | | GB_BA1: MSGB577COS | 37770 | L01263 | M. leprae genomic dna sequence, cosmid b577. | Mycobacterium leprae | 56,323 | 14-Jun-96 |
| | | GB_BA1: MLCB2407 | 35615 | AL023596 | Mycobacterium leprae cosmid B2407. | Mycobacterium leprae | 37,645 | 27-Aug-99 |
| rxa01270 | 1278 | GB_BA1: BSPX91182 | 345 | X91182 | Bacterial sp. partial 16S rRNA gene (clone group G10). | unidentified bacterium | 41,228 | 15-Jul-96 |
| | | GB_BA1: BSPJN12D | 347 | Z69277 | Bacterial sp. partial 16S rRNA gene (clone group JN12d). | Bacteria | 38,905 | 24-Jun-98 |
| | | GB_EST7: W93397 | 545 | W93397 | zd95b03.s1 Soares_fetal_heart_NbHH19WHomo sapiens cDNA clone | Homo sapiens | 40,516 | 25-Nov-96 |
| | | | | | IMAGE: 357197 3′, mRNA sequence. | | | |
| rxa01277 | 2127 | GB_PL2: AF111709 | 52684 | AF111709 | Oryza sativa subsp.indica Retrosat 1 retrotransposon and Ty3-Gypsy type | Oryza sativa subsp.indica | 37,410 | 26-Apr-99 |
| | | | | | Retrosat 2 retrotransposon, complete sequences; and unknown genes. | | | |
| | | GB_IN1: CELZC250 | 34372 | AF003383 | Caenorhabditis elegans cosmid ZC250. | Caenorhabditis elegans | 35,506 | 14-MAY-1997 |
| | | GB_EST1: Z14808 | 331 | Z14808 | CEL5E4 Chris Martin sorted cDNA libraryCaenorhabditis elegans cDNA | Caenorhabditis elegans | 36,890 | 19-Jun-97 |
| | | | | | clone cm5e4 5′, mRNA sequence. | | | |
| rxa01288 | 498 | GB_VI: S62819 | 3348 | S62819 | F2L = putative RNA polymerase-associated transcription factor . . . F4R = | | 40,471 | 25-Aug-93 |
| | | | | | type I orf virus topoisomerase homolog [orf virus OV, NZ2, host = sheep, | | | |
| | | | | | Genomic, 3 genes, 3348 nt]. | | | |
| | | GB_PR4: HUMCCLEC1 | 17079 | AF077344 | Homo sapiens cartilage-derived C-type lectin (CLECSF1) gene, exons 1 | Homo sapiens | 34,631 | 15-OCT-1999 |
| | | | | | and 2. | | | |
| | | GB_PR4: HUMCCLEC1 | 17079 | AF077344 | Homo sapiens cartilage-derived C-type lectin (CLECSF1) gene, exons 1 | Homo sapiens | 39,300 | 15-OCT-1999 |
| | | | | | and 2. | | | |
| rxa01354 | 1059 | GB_PR1: D87675 | 301692 | D87675 | Homo sapiens DNA for amyloid precursor protein, complete cds. | Homo sapiens | 37,984 | 22-Sep-97 |
| | | GB_PR1: D87675 | 301692 | D87675 | Homo sapiens DNA for amyloid precursor protein, complete cds. | Homo sapiens | 35,140 | 22-Sep-97 |
| | | GB_RO: MMNUCLEO | 11478 | X07699 | Mouse nucleolin gene. | Mus musculus | 37,146 | 27-Aug-98 |
| rxa01376 | 984 | GB_BA1: MTCY71 | 42729 | Z92771 | Mycobacterium tuberculosis H37Rv complete genome; segment 141/162. | Mycobacterium tuberculosis | 39,496 | 10-Feb-99 |
| | | GB_BA1: ACCPSXM | 2748 | X81320 | A. calcoaceticus epsX and epsM genes. | Acinetobacter calcoaceticus | 40,353 | 19-OCT-1994 |
| | | GB_BA2: ECU05248 | 1781 | U05248 | Escherichia coli polysialic acid gene cluster region 2 (neuD and neuB) | Escherichia coli | 34,995 | 1-Feb-95 |
| | | | | | genes, complete cds. | | | |
| rxa01385 | 2004 | GB_BA1: FVBPENTA | 2519 | M98557 | Flavobacterium sp. pentachlorophenol 4-monooxygenase gene, complete | Flavobacterium sp. | 40,855 | 26-Apr-93 |
| | | | | | mRNA. | | | |
| | | GB_PAT: I19994 | 2516 | I19994 | Sequence 2 from patent US 5512478. | Unknown. | 40,855 | 07-OCT-1996 |
| | | GB_BA2: AF059680 | 2410 | AF059680 | Sphingomonas sp. UG30 pentachlorophenol 4-monooxygenase (pcpB) | Sphingomonas sp. UG30 | 42,993 | 27-Apr-99 |
| | | | | | gene, complete cds; and pentachlorophenol 4-monooxygenase reductase | | | |
| | | | | | (pcpD) gene, partial cds. | | | |
| rxa01426 | 750 | GB_GSS3: B35912 | 313 | B35912 | HS-1031-A2-D02-MR.abi CIT Human Genomic Sperm Library CHomo | Homo sapiens | 38,019 | 17-OCT-1997 |
| | | | | | sapiens genomic clone Plate = CT 811 Col = 4 Row = G, genomic survey | | | |
| | | | | | sequence. | | | |
| | | GB_GSS1: FR0027767 | 497 | AL020589 | F. rubripes GSS sequence, clone 197B17aA3, | Fugu rubripes | 35,814 | 10-DEC-1997 |
| | | | | | genomic survey sequence. | | | |
| | | GB_GSS5: AQ774340 | 449 | AQ774340 | HS_3137_A2_E11_MR CIT Approved Human Genomic Sperm Library D | Homo sapiens | 40,535 | 29-Jul-99 |
| | | | | | Homo sapiens genomic clone Plate = 3137 Col = 22 Row = I, genomic survey | | | |
| | | | | | sequence. | | | |
| rxa01427 | 1044 | GB_BA2: AF036766 | 3487 | AF036766 | Lactobacillus reuteri plasmid pTE15 replication-associated protein A (repA) | Lactobacillus reuteri | 39,101 | 19-Feb-98 |
| | | | | | and replication-associated protein B (repB) genes, complete cds. | | | |
| | | GB_PR4: AC007032 | 126803 | AC007032 | Homo sapiens clone NH0022N19, complete sequence. | Homo sapiens | 34,180 | 17-Jul-99 |
| | | GB_PR4: AC007032 | 126803 | AC007032 | Homo sapiens clone NH0022N19, complete sequence. | Homo sapiens | 36,858 | 17-Jul-99 |
| rxa01428 | 1260 | GB_BA1: SCH24 | 41625 | AL049826 | Streptomyces coelicolor cosmid H24. | Streptomyces coelicolor | 51,278 | 11-MAY-1999 |
| | | GB_BA2: AF031590 | 6676 | AF031590 | Streptomyces coelicolor thioredoxin (trxA) gene, partial cds; SpoOJ-like, Soj- | Streptomyces coelicolor | 39,389 | 20-Feb-98 |
| | | | | | like, GidB-like, Jag-like, inner membrane protein, and 9-10 kDa protein-like | | | |
| | | | | | genes, complete cds; RNase P protein (rnpA) gene, partial cds; and | | | |
| | | | | | unknown gene. | | | |
| | | GB_BA1: SCTRXARNP | 6676 | Y16311 | Streptomyces coelicolor trxA & rnpA genes & ORFs 205, 344, 255, 239, | Streptomyces coelicolor | 39,389 | 18-DEC-1998 |
| | | | | | 170, 341 & 124. | | | |
| rxa01430 | 1311 | GB_EST30: AI643302 | 254 | AI643302 | vI39b08.y1 Stratagene mouse skin (#937313)Mus musculus cDNA clone | Mus musculus | 38,627 | 29-Apr-99 |
| | | | | | IMAGE: 974583 5′ similar to SW: 6PGD_HUMAN P52209 6- | | | |
| | | | | | PHOSPHOGLUCONATE DEHYDROGENASE, DECARBOXYLATING;, | | | |
| | | | | | mRNA sequence. | | | |
| | | GB_EST34: AI788121 | 490 | AI788121 | ul17f02.y1 Sugano mouse embryo mewaMus musculus cDNA clone | Mus musculus | 40,583 | 2-Jul-99 |
| | | | | | IMAGE: 2087835 5′ similar to SW: 6PGD_HUMAN P52209 6- | | | |
| | | | | | PHOSPHOGLUCONATE DEHYDROGENASE, DECARBOXYLATING;, | | | |
| | | | | | mRNA sequence. | | | |
| | | GB_EST16: AA560354 | 253 | AA560354 | vl39b08.r1 Stratagene mouse skin (#937313)Mus musculus cDNA clone | Mus musculus | 42,544 | 18-Aug-97 |
| | | | | | IMAGE: 974583 5′ similar to TR: G984325 G984325 | | | |
| | | | | | PHOSPHOGLUCONATE DEHYDROGENASE.;, mRNA sequence. | | | |
| rxa01435 | 893 | GB_EST22: AI069195 | 892 | AI069195 | mgae0005dF02fMagnaporthe grisea Appressorium Stage cDNA Library | Pyricularia grisea | 40,964 | 09-DEC-1999 |
| | | | | | Pyricularia grisea cDNA clone mgae0005dF02f 5′, mRNA sequence. | | | |
| | | GB_EST26: AI392390 | 574 | AI392390 | NCSC1B12T7 Subtracted ConidialNeurospora crassa cDNA clone SC1B12 | Neurospora crassa | 40,127 | 3-Feb-99 |
| | | | | | 3′ similar to adenylate kinase 2 (ATP-AMP transphosphorylase), mRNA | | | |
| | | | | | sequence. | | | |
| | | GB_HTG2: AC004845 | 140230 | AC004845 | Homo sapiens clone DJ0635O05, *** SEQUENCING IN PROGRESS ***, 7 | Homo sapiens | 36,437 | 12-Jun-98 |
| | | | | | unordered pieces. | | | |
| rxa01437 | 1506 | GB_BA1: CGPTAACKA | 3657 | X89084 | C. glutamicum pta gene and ackA gene. | Corynebacterium glutamicum | 100,000 | 23-MAR-1999 |
| | | GB_BA1: MTCY22G10 | 35420 | Z84724 | Mycobacterium tuberculosis H37Rv complete genome; segment 21/162. | Mycobacterium tuberculosis | 54,867 | 17-Jun-98 |
| | | GB_HTG3: AC010254 | 114363 | AC010254 | Homo sapiens chromosome 5 clone CIT-HSPC_434O11, *** SEQUENCING | Homo sapiens | 35,547 | 15-Sep-99 |
| | | | | | IN PROGRESS ***, 58 unordered pieces. | | | |
| rxa01461 | 735 | GB_BA2: AF003947 | 5475 | AF003947 | Rhodococcus opacus succinyl CoA: 3-oxoadipate CoA transferase subunit | Rhodococcus opacus | 57,939 | 12-MAR-1998 |
| | | | | | homolog (pcal′) gene, partial cds, protocatechuate dioxygenase beta | | | |
| | | | | | subunit (pcaH), protocatechuate dioxygenase alpha subunit (pcaG), 3- | | | |
| | | | | | carboxy-cis, cis-muconate cycloisomerase homolog (pcaB), 3-oxoadipate | | | |
| | | | | | enol-lactone hydrolase/4-carboxymuconolactone decarboxylase (pcaL) and | | | |
| | | | | | PcaR (pcaR) genes, complete cds, and 3-oxoadipyl CoA thiolase homolog | | | |
| | | | | | (pcaF′) gene, partial cds. | | | |
| | | GB_PR2: HSA535K18 | 182408 | AL078638 | Human DNA sequence from clone RP11-535K18 on chromosome | Homo sapiens | 37,123 | 22-Nov-99 |
| | | | | | Xq26.2-27.1, complete sequence. | | | |
| | | GB_EST33: AI764654 | 420 | AI764654 | UI-R-Y0-abw-e-02-0-UI.s2 UI-R-Y0Rattus norvegicus cDNA clone UI-R-Y0- | Rattus norvegicus | 35,885 | 25-Jun-99 |
| | | | | | abw-e-02-0-UI 3′, mRNA sequence. | | | |
| rxa01462 | 813 | GB_BA2: AF003947 | 5475 | AF003947 | Rhodococcus opacus succinyl CoA: 3-oxoadipate CoA transferase subunit | Rhodococcus opacus | 66,667 | 12-MAR-1998 |
| | | | | | homolog (pcal′) gene, partial cds, protocatechuate dioxygenase beta | | | |
| | | | | | subunit (pcaH), protocatechuate dioxygenase alpha subunit (pcaG), 3- | | | |
| | | | | | carboxy-cis, cis-muconate cycloisomerase homolog (pcaB), 3-oxoadipate | | | |
| | | | | | enol-lactone hydrolase/4-carboxymuconolactone decarboxylase (pcaL)and | | | |
| | | | | | PcaR (pcaR) genes, complete cds, and 3-oxoadipyl CoA thiolase homolog | | | |
| | | | | | (pcaF′) gene, partial cds. | | | |
| | | GB_BA1: SC4C6 | 30941 | AL079355 | Streptomyces coelicolor cosmid 4C6. | Streptomyces coelicolor | 40,822 | 21-Jun-99 |
| | | GB_BA2: AF109386 | 6551 | AF109386 | Streptomyces sp. 2065 protocatechuaic acid catabolic gene cluster, | Streptomyces sp. 2065 | 56,049 | 06-DEC-1999 |
| | | | | | complete sequence. | | | |
| rxa01464 | 414 | GB_BA1: AB009343 | 6342 | AB009343 | Frateuria sp. ANA-18 ORFR2, catBI, catCI, catAI and catD genes, complete | Frateuria sp. ANA-18 | 50,966 | 26-MAY-1999 |
| | | | | | cds. | | | |
| | | GB_GSS10: AQ241375 | 284 | AQ241375 | CITBI-EI-2505O7.TF.1 CITBI-E1Homo sapiens genomic clone 2505O7, | Homo sapiens | 39,085 | 30-Sep-98 |
| | | | | | genomic survey sequence. | | | |
| | | GB_HTG3: AC010363 | 174962 | AC010363 | Homo sapiens chromosome 5 clone CITB-H1_2039P12, *** SEQUENCING | Homo sapiens | 35,784 | 15-Sep-99 |
| | | | | | IN PROGRESS ***, 43 unordered pieces. | | | |
| rxa01465 | 1284 | GB_BA1: ROX99622 | 7224 | X99622 | Rhodococcus opacus catR, catA, catB, catC genes and five ORFs. | Rhodococcus opacus | 58,814 | 24-Sep-97 |
| | | GB_BA1: D83237 | 1626 | D83237 | Rhodococcus erythropolis DNA for catechol 1,2-dioxgenase, complete cds. | Rhodococcus erythropolis | 53,904 | 1-Sep-99 |
| | | GB_EST9: AA119571 | 445 | AA119571 | mp68d04.r1 Soares 2NbMT Mus musculus cDNA clone IMAGE: 574375 5′ | Mus musculus | 39,551 | 17-Feb-97 |
| | | | | | similar to TR: G559375 G559375 RAS GTPASE-ACTIVATING PROTEIN.;, | | | |
| | | | | | mRNA sequence. | | | |
| rxa01466 | 1083 | GB_EST37: AI934978 | 425 | AI934978 | wd17b06.x1 Soares_NFL_T_GBC_S1 Homo sapiens cDNA clone | Homo sapiens | 43,609 | 2-Sep-99 |
| | | | | | IMAGE: 2328371 3′, mRNA sequence. | | | |
| | | GB_EST15: AA465729 | 289 | AA465729 | aa32g06.s1 NCI_CGAP_GCB1 Homo sapiens cDNA clone IMAGE: 815002 | Homo sapiens | 41,115 | 13-Aug-97 |
| | | | | | 3′, mRNA sequence. | | | |
| | | GB_EST24: AI219091 | 633 | AI219091 | qg12a05.x1 Soares_placenta_8to9weeks_2NbHP8to9 W Homo sapiens | Homo sapiens | 36,066 | 29-Nov-98 |
| | | | | | cDNA clone IMAGE: 1759280 3′ similar to TR: Q99988 Q99988 TGF-BETA | | | |
| | | | | | SUPERFAMILY PROTEIN. [1];, mRNA sequence. | | | |
| rxa01477 | 1671 | GB_BA2: CGU89648 | 1105 | U89648 | Corynebacterium glutamicum unidentified sequence involved in histidine | Corynebacterium glutamicum | 49,726 | 30-MAR-1999 |
| | | | | | biosynthesis, partial sequence. | | | |
| | | GB_EST21: AA919685 | 782 | AA919685 | vx11g06.r1 Soares 2NbMT Mus musculus cDNA clone IMAGE: 1264186 5′ | Mus musculus | 37,762 | 20-Apr-98 |
| | | | | | similar to gb: M73696 Murine Glvr-1 mRNA, complete cds (MOUSE);, mRNA | | | |
| | | | | | sequence. | | | |
| | | GB_HTG2: HS1005F21 | 101795 | AL078633 | Homo sapiens chromosome 20 clone RP5-1005F21, *** SEQUENCING IN | Homo sapiens | 38,371 | 30-Nov-99 |
| | | | | | PROGRESS ***, in unordered pieces. | | | |
| rxa01499 | 3945 | GB_PR4: AC006454 | 153201 | AC006454 | Homo sapiens clone DJ0852P06, complete sequence. | Homo sapiens | 38,033 | 13-Aug-99 |
| | | GB_BA1: LSLYSSYNT | 4724 | AC006454 | Lysobacter sp. gene encoding synthetase. | Lysobacter | 42,840 | 8-Jan-97 |
| | | GB_PR4: AC006454 | 153201 | AC006454 | Homo sapiens clone DJ0852P06, complete sequence. | Homo sapiens | 38,823 | 13-Aug-99 |
| rxa01502 | 1356 | GB_PAT: I92046 | 2203 | I92046 | Sequence 13 from patent US 5726299. | Unknown. | 39,755 | 01-DEC-1998 |
| | | GB_PAT: I78757 | 2203 | I78757 | Sequence 13 from patent US 5693781. | Unknown. | 39,755 | 3-Apr-98 |
| | | GB_BA1: MTCY359 | 36021 | Z83859 | Mycobacterium tuberculosis H37Rv complete genome; segment 84/162. | Mycobacterium tuberculosis | 36,613 | 17-Jun-98 |
| rxa01509 | 597 | GB_BA1: SCE9 | 37730 | AL049841 | Streptomyces coelicolor cosmid E9. | Streptomyces coelicolor | 60,637 | 19-MAY-1999 |
| | | GB_BA1: MTY15C10 | 33050 | Z95436 | Mycobacterium tuberculosis H37Rv complete genome; segment 154/162. | Mycobacterium tuberculosis | 59,296 | 17-Jun-98 |
| | | GB_BA1: MLCB2548 | 38916 | AL023093 | Mycobacterium leprae cosmid B2548. | Mycobacterium leprae | 59,764 | 27-Aug-99 |
| rxa01510 | 1404 | GB_GSS9: AQ129927 | 440 | AQ129927 | HS_2165_B1_D09_MR CIT Approved Human Genomic Sperm Library D | Homo sapiens | 36,136 | 23-Sep-98 |
| | | | | | Homo sapiens genomic clone Plate = 2165 Col = 17 Row = H, genomic survey | | | |
| | | | | | sequence. | | | |
| | | GB_BA2: AF016585 | 41097 | AF016585 | Streptomyces caelestis cytochrome P-450 hydroxylase homolog (nidi) gene, | Streptomyces caelestis | 37,464 | 07-DEC-1997 |
| | | | | | partial cds; polyketide synthase modules 1 through 7 (nidA) genes, | | | |
| | | | | | complete cds; and N-methyltransferase homolog gene, partial cds. | | | |
| | | GB_HTG4: AC010747 | 216500 | AC010747 | Homo sapiens chromosome unknown clone NH0555H09, WORKING | Homo sapiens | 33,022 | 29-OCT-1999 |
| | | | | | DRAFT SEQUENCE, in unordered pieces. | | | |
| rxa01511 | 1065 | GB_BA1: BRLBIOBA | 1647 | D14084 | Brevibacterium flavum gene for biotin synthetase, complete cds. | Corynebacterium glutamicum | 40,283 | 3-Feb-99 |
| | | GB_GSS3: B45213 | 358 | B45213 | HS-1060-B2-D07-MF.abi CIT Human Genomic Sperm Library C Homo | Homo sapiens | 49,505 | 21-OCT-1997 |
| | | | | | sapiens genomic clone Plate = CT 782 Col = 14 Row = H, genomic survey | | | |
| | | | | | sequence. | | | |
| | | GB_HTG4: AC010747 | 216500 | AC010747 | Homo sapiens chromosome unknown clone NH0555H09, WORKING | Homo sapiens | 33,819 | 29-OCT-1999 |
| | | | | | DRAFT SEQUENCE, in unordered pieces. | | | |
| rxa01513 | 2682 | GB_BA1: MTCY7H7B | 24244 | Z95557 | Mycobacterium tuberculosis H37Rv complete genome; segment 153/162. | Mycobacterium tuberculosis | 40,354 | 18-Jun-98 |
| | | GB_BA2: AF037269 | 2364 | AF037269 | Mycobacterium smegmatis cell division protein (FtsH) gene, complete cds. | Mycobacterium smegmatis | 60,814 | 19-Aug-98 |
| | | GB_BA1: MLCB2548 | 38916 | AL023093 | Mycobacterium leprae cosmid B2548. | Mycobacterium leprae | 39,992 | 27-Aug-99 |
| rxa01593 | 990 | GB_BA1: U00012 | 33312 | U00012 | Mycobacterium leprae cosmid B1308. | Mycobacterium leprae | 39,126 | 30-Jan-96 |
| | | GB_IN1: CELF27E11 | 25700 | AF016413 | Caenorhabditis elegans cosmid F27E11. | Caenorhabditis elegans | 34,227 | 2-Aug-97 |
| | | GB_OV: DYGAGR | 4354 | L01423 | Discopyge ommata (clone OL4) agrin mRNA, 3′ end cds. | Discopyge ommata | 38,414 | 28-Apr-93 |
| rxa01608 | 1962 | GB_BA2: AF119150 | 18605 | AF119150 | Vibrio cholerae Rtx toxin gene cluster, complete cds. | Vibrio cholerae | 36,919 | 21-MAR-1999 |
| | | GB_BA2: AF119150 | 18605 | AF119150 | Vibrio cholerae Rtx toxin gene cluster, complete cds. | Vibrio cholerae | 38,130 | 21-MAR-1999 |
| rxa01620 | | | | | | | | |
| rxa01640 | 3441 | GB_PR3: HS52D1 | 148691 | Z96811 | Human DNA sequence from PAC 52D1 on chromosome Xq21. Contains CA | Homo sapiens | 35,501 | 23-Nov-99 |
| | | | | | repeats, STS. | | | |
| | | GB_BA2: AF079155 | 686 | AF079155 | Ralstonia eutropha phasin (phaP) mRNA, complete cds. | Ralstonia eutropha | 40,497 | 6-Apr-99 |
| | | GB_IN2: AF039570 | 1866 | AF039570 | Caenorhabditis elegans aryl hydrocarbon receptor ortholog AHR-1 (ahr-1) | Caenorhabditis elegans | 39,699 | 04-OCT-1999 |
| | | | | | mRNA, complete cds. | | | |
| rxa01653 | 1584 | GB_HTG7: AC010997 | 187768 | AC010997 | Homo sapiens clone RP11-399K21, *** SEQUENCING IN PROGRESS ***, | Homo sapiens | 34,516 | 08-DEC-1999 |
| | | | | | 35 unordered pieces. | | | |
| | | GB_HTG7: AC010997 | 187768 | AC010997 | Homo sapiens clone RP11-399K21, *** SEQUENCING IN PROGRESS ***, | Homo sapiens | 36,177 | 08-DEC-1999 |
| | | | | | 35 unordered pieces. | | | |
| | | GB_VI: AF030154 | 34446 | AF030154 | Bovine adenovirus 3 complete genome. | bovine adenovirus type 3 | 40,345 | 27-Jan-99 |
| rxa01716 | 509 | GB_BA1: AB010645 | 16836 | AB010645 | Acetobacter xylinus genes for endoglucanase, cellulose synthase subunit | Acetobacter xylinus | 34,783 | 13-Feb-99 |
| | | | | | ABCD and beta-glucosidase, complete cds. | | | |
| | | GB_BA1: AB010645 | 16836 | AB010645 | Acetobacter xylinus genes for endoglucanase, cellulose synthase subunit | Acetobacter xylinus | 37,598 | 13-Feb-99 |
| | | | | | ABCD and beta-glucosidase, complete cds. | | | |
| | | GB_BA1: ABCBCSABCD | 9540 | M37202 | A. xylinum bcs A, B, C and D genes, complete cds's. | Acetobacter xylinus | 39,173 | 24-Apr-93 |
| rxa01728 | 1098 | GB_BA2: CORCSLYS | 2821 | M89931 | Corynebacterium glutamicum beta C-S lyase (aecD) and branched-chain | Corynebacterium glutamicum | 99,636 | 4-Jun-98 |
| | | | | | amino acid uptake carrier (brnQ) genes, complete cds, and hypothetical | | | |
| | | | | | protein Yhbw (yhbw) gene, partial cds. | | | |
| | | GB_PL2: HAAP | 931 | X95952 | H. annuus mRNA for aquaporin. | Helianthus annuus | 39,231 | 14-Jul-99 |
| | | GB_HTG1: CEY32F6 | 187816 | AL008875 | Caenorhabditis elegans chromosome V clone Y32F6, *** SEQUENCING IN | Caenorhabditis elegans | 37,431 | 9-Nov-97 |
| | | | | | PROGRESS ***, in unordered pieces. | | | |
| rxa01732 | 1173 | GB_PR4: HUAC004125 | 194020 | AC004125 | Homo sapiens Chromosome 16 BAC clone CIT987SK-625P11, complete | Homo sapiens | 35,345 | 23-Nov-99 |
| | | | | | sequence. | | | |
| | | GB_PR4: HUAC004125 | 194020 | AC004125 | Homo sapiens Chromosome 16 BAC clone CIT987SK-625P11, complete | Homo sapiens | 37,381 | 23-Nov-99 |
| | | | | | sequence. | | | |
| | | GB_IN1: CER11A5 | 26671 | Z83122 | Caenorhabditis elegans cosmid R11A5, complete sequence. | Caenorhabditis elegans | 36,140 | 2-Sep-99 |
| rxa01810 | 1200 | GB_EST28: AI499508 | 403 | AI499508 | to02d01.x1 NCI_CGAP_Ut2 Homo sapiens cDNA clone IMAGE: 2177857 3′ | Homo sapiens | 36,725 | 11-MAR-1999 |
| | | | | | similar to SW: NU4M_PANTR P03906 NADH-UBIQUINONE | | | |
| | | | | | OXIDOREDUCTASE CHAIN 4;, mRNA sequence. | | | |
| | | GB_EST28: AI499508 | 403 | AI499508 | to02d01.x1 NCI_CGAP_Ut2 Homo sapiens cDNA clone IMAGE: 2177857 3′ | Homo sapiens | 38,264 | 11-MAR-1999 |
| | | | | | similar to SW: NU4M_PANTR P03906 NADH-UBIQUINONE | | | |
| | | | | | OXIDOREDUCTASE CHAIN 4;, mRNA sequence. | | | |
| rxa01828 | 1545 | GB_BA1: MLCB1770 | 37821 | Z70722 | Mycobacterium leprae cosmid B1770. | Mycobacterium leprae | 36,411 | 29-Aug-97 |
| | | GB_HTG2: AC008073 | 173144 | AC008073 | Homo sapiens clone NH0507M03, *** SEQUENCING IN PROGRESS ***, 3 | Homo sapiens | 36,310 | 17-Jul-99 |
| | | | | | unordered pieces. | | | |
| | | GB_HTG2: AC008073 | 173144 | AC008073 | Homo sapiens clone NH0507M03, *** SEQUENCING IN PROGRESS ***, 3 | Homo sapiens | 36,310 | 17-Jul-99 |
| | | | | | unordered pieces. | | | |
| rxa01829 | 1446 | GB_IN1: AB018544 | 620 | AB018544 | Hydra magnipapillata mRNA for Hym-176 preprohormone, complete cds. | Hydra magnipapillata | 34,855 | 6-Feb-99 |
| | | GB_EST8: AA003136 | 450 | AA003136 | mg51e01.r1 Soares mouse embryo NbME13.5 14.5 Mus musculus cDNA | Mus musculus | 42,202 | 19-Jul-96 |
| | | | | | clone IMAGE: 427320 5′ similar to gb: X07315 PLACENTAL PROTEIN 15 | | | |
| | | | | | (HUMAN);, mRNA sequence. | | | |
| | | GB_IN1: AB018544 | 620 | AB018544 | Hydra magnipapillata mRNA for Hym-176 preprohormone, complete cds. | Hydra magnipapillata | 35,968 | 6-Feb-99 |
| rxa01868 | 2049 | GB_BA1: MTV033 | 21620 | AL021928 | Mycobacterium tuberculosis H37Rv complete genome; segment 11/162. | Mycobacterium tuberculosis | 38,679 | 17-Jun-98 |
| | | GB_BA1: MLCL622 | 42498 | Z95398 | Mycobacterium leprae cosmid L622. | Mycobacterium leprae | 38,911 | 24-Jun-97 |
| | | GB_BA1: MSGB983CS | 36788 | L78828 | Mycobacterium leprae cosmid B983 DNA sequence. | Mycobacterium leprae | 38,933 | 15-Jun-96 |
| rxa01934 | 681 | GB_PR4: DJ534K4 | 216387 | AF109907 | Homo sapiens S164 gene, partial cds; PS1 and hypothetical protein genes, | Homo sapiens | 39,189 | 23-DEC-1998 |
| | | | | | complete cds; and S171 gene, partial cds. | | | |
| | | GB_HTG2: AC006342 | 201618 | AC006342 | Homo sapiens clone DJ0054D12, *** SEQUENCING IN PROGRESS ***, 3 | Homo sapiens | 34,412 | 11-Jan-99 |
| | | | | | unordered pieces. | | | |
| | | GB_HTG2: AC006342 | 201618 | AC006342 | Homo sapiens clone DJ0054D12, *** SEQUENCING IN PROGRESS ***, 3 | Homo sapiens | 34,412 | 11-Jan-99 |
| | | | | | unordered pieces. | | | |
| rxa01967 | 1266 | GB_IN2: AC005467 | 62091 | AC005467 | Drosophila melanogaster, chromosome 2R, region 48C1-48C2, P1 clone | Drosophila melanogaster | 35,252 | 12-DEC-1998 |
| | | | | | DS00568, complete sequence. | | | |
| | | GB_BA2: AE001678 | 13485 | AE001678 | Chlamydia pneumoniae section 94 of 103 of the complete genome. | Chlamydophila pneumoniae | 35,203 | 08-MAR-1999 |
| | | GB_IN2: AC005467 | 62091 | AC005467 | Drosophila melanogaster, chromosome 2R, region 48C1-48C2, P1 clone | Drosophila melanogaster | 34,699 | 12-DEC-1998 |
| | | | | | DS00568, complete sequence. | | | |
| rxa01993 | 1166 | GB_BA1: PPVANAB | 2864 | Y14759 | Pseudomonas putida vanA and vanB genes. | Pseudomonas putida | 51,697 | 09-MAY-1998 |
| | | GB_HTG2: AC006799 | 278007 | AC006799 | Caenorhabditis elegans clone Y51H7, *** SEQUENCING IN PROGRESS | Caenorhabditis elegans | 38,455 | 23-Feb-99 |
| | | | | | ***, 7 unordered pieces. | | | |
| | | GB_HTG2: AC006799 | 278007 | AC006799 | Caenorhabditis elegans clone Y51H7, *** SEQUENCING IN PROGRESS | Caenorhabditis elegans | 38,455 | 23-Feb-99 |
| | | | | | ***, 7 unordered pieces. | | | |
| rxa01994 | 1098 | GB_HTG4: AC009961 | 231522 | AC009961 | Homo sapiens chromosome unknown clone NH0357L02, WORKING | Homo sapiens | 35,576 | 29-OCT-1999 |
| | | | | | DRAFT SEQUENCE, in unordered pieces. | | | |
| | | GB_HTG4: AC009961 | 231522 | AC009961 | Homo sapiens chromosome unknown clone NH0357L02, WORKING | Homo sapiens | 35,576 | 29-OCT-1999 |
| | | | | | DRAFT SEQUENCE, in unordered pieces. | | | |
| | | GB_HTG4: AC009961 | 231522 | AC009961 | Homo sapiens chromosome unknown clone NH0357L02, WORKING | Homo sapiens | 35,472 | 29-OCT-1999 |
| | | | | | DRAFT SEQUENCE, in unordered pieces. | | | |
| rxa01997 | 609 | GB_BA2: AF112536 | 1798 | AF112536 | Corynebacterium glutamicum ribonucleotide reductase beta-chain (nrdF) | Corynebacterium glutamicum | 37,719 | 5-Aug-99 |
| | | | | | gene, complete cds. | | | |
| | | GB_BA1: SCH66 | 9153 | AL049731 | Streptomyces coelicolor cosmid H66. | Streptomyces coelicolor | 38,655 | 29-Apr-99 |
| | | GB_EST29: AI558691 | 598 | AI558691 | fb79c10.y1 Zebrafish WashU MPIMG EST Danio rerio cDNA 5′ similar to | Danio rerio | 40,232 | 24-MAR-1999 |
| | | | | | SW: ATF3_HUMAN P18847 CYCLIC-AMP-DEPENDENT | | | |
| | | | | | TRANSCRIPTION FACTOR ATF-3;, mRNA sequence. | | | |
| rxa02052 | 915 | GB_EST3: R64206 | 453 | R64206 | yi18d08.r1 Soares placenta Nb2HP Homo sapiens cDNA clone | Homo sapiens | 35,920 | 26-MAY-1995 |
| | | | | | IMAGE: 139599 5′, mRNA sequence. | | | |
| | | GB_PR2: AC002540 | 70851 | AC002540 | Human BAC clone GS025M02 from 7q21-q22, complete sequence. | Homo sapiens | 37,099 | 12-Sep-97 |
| | | GB_GSS3: B55001 | 406 | B55001 | CIT-HSP-385H2. TRB CIT-HSP Homo sapiens genomic clone 385H2, | Homo sapiens | 35,599 | 20-Jun-98 |
| | | | | | genomic survey sequence. | | | |
| rxa02064 | 762 | GB_PR4: AF135187 | 33016 | AF135187 | Homo sapiens interferon-induced protein p78 (MX1) gene, complete cds. | Homo sapiens | 32,935 | 8-Jul-99 |
| | | GB_PR3: AC005612 | 60904 | AC005612 | Homo sapiens chromosome 21, P1 clone LBL#8 (LBNL H8), complete | Homo sapiens | 32,935 | 4-Sep-98 |
| | | | | | sequence. | | | |
| | | GB_PR1: HUM8DC11Z | 3949 | L35666 | Homo sapiens (subclone H8 10_f11 from P1 35 H5 C8) DNA sequence. | Homo sapiens | 31,995 | 22-Aug-94 |
| rxa02082 | 3010 | GB_BA1: MSGB32CS | 36404 | L78818 | Mycobacterium leprae cosmid B32 DNA sequence. | Mycobacterium leprae | 50,604 | 15-Jun-96 |
| | | GB_BA1: MTCY338 | 29372 | Z74697 | Mycobacterium tuberculosis H37Rv complete genome; segment 127/162. | Mycobacterium tuberculosis | 38,113 | 17-Jun-98 |
| | | GB_GSS10: AQ242118 | 766 | AQ242118 | 3I23-4r Ochrobactrum anthropi BAC Library Ochrobactrum anthropi | Ochrobactrum anthropi | 41,876 | 02-OCT-1998 |
| | | | | | genomic clone 3I23-4r, genomic survey sequence. | | | |
| rxa02083 | 1533 | GB_PR4: AC008055 | 196899 | AC008055 | Homo sapiens 12q22-103.4-106.5 BAC RPCI11-718L23 (Roswell Park | Homo sapiens | 36,818 | 09-OCT-1999 |
| | | | | | Cancer Institute Human BAC Library) complete sequence. | | | |
| | | GB_PL2: AC002292 | 120787 | AC002292 | Genomic sequence of Arabidopsis BAC F8A5, complete sequence. | Arabidopsis thaliana | 37,517 | 02-OCT-1997 |
| | | GB_PR4: AC008055 | 196899 | AC008055 | Homo sapiens 12q22-103.4-106.5 BAC RPCI11-718L23 (Roswell Park | Homo sapiens | 35,563 | 09-OCT-1999 |
| | | | | | Cancer Institute Human BAC Library) complete sequence. | | | |
| rxa02092 | 1761 | GB_BA2: AF031929 | 2675 | AF031929 | Lactobacillus helveticus cochaperonin GroES and chaperonin GroEL genes, | Lactobacillus helveticus | 36,149 | 8-Aug-98 |
| | | | | | complete cds; and DNA mismatch repair enzyme (hexA) gene, partial cds. | | | |
| | | GB_HTG1: HSDJ34F7 | 129811 | AL049547 | Homo sapiens chromosome 6 clone RP1-34F7, *** SEQUENCING IN | Homo sapiens | 37,587 | 23-Nov-99 |
| | | | | | PROGRESS ***, in unordered pieces. | | | |
| | | GB_PR2: HSU24578 | 17488 | U24578 | Human RP1 and complement C4B precursor (C4B) genes, partial cds. | Homo sapiens | 36,755 | 16-MAY-1996 |
| rxa02098 | 1869 | GB_BA1: CAJ10319 | 5368 | AJ010319 | Corynebacterium glutamicum amtP, gInB, gInD genes and partial ftsY and | Corynebacterium glutamicum | 99,766 | 14-MAY-1999 |
| | | | | | srp genes. | | | |
| | | GB_BA1: CAJ10319 | 5368 | AJ010319 | Corynebacterium glutamicum amtP, gInB, gInD genes and partial ftsY and | Corynebacterium glutamicum | 36,983 | 14-MAY-1999 |
| | | | | | srp genes. | | | |
| rxa02105 | 391 | GB_EST17: | 352 | AA660065 | EST00115 watermelon lambda zap express library Citrullus lanatus cDNA | Citrullus lanatus | 37,231 | 10-Nov-97 |
| | | | | | clone WMLS233 5′ similar to translation initiation factor, mRNA sequence. | | | |
| | | GB_GSS6: AQ839377 | 523 | AQ839377 | HS_4640_B2_F09_T7A CIT Approved Human Genomic Sperm Library D | Homo sapiens | 37,500 | 30-Aug-99 |
| | | | | | Homo sapiens genomic clone Plate = 4640 Col = 18 Row = L, genomic survey | | | |
| | | | | | sequence. | | | |
| | | GB_PL1: SPCC970 | 31438 | AL031530 | S. pombe chromosome III cosmid c970. | Schizosaccharomyces | 38,268 | 07-MAY-1999 |
| | | | | | | pombe | | |
| rxa02111 | 1407 | GB_BA1: SC6G10 | 36734 | AL049497 | Streptomyces coelicolor cosmid 6G10. | Streptomyces coelicolor | 50,791 | 24-MAR-1999 |
| | | GB_BA1: U00010 | 41171 | U00010 | Mycobacterium leprae cosmid B1170. | Mycobacterium leprae | 37,563 | 01-MAR-1994 |
| | | GB_BA1: MTCY336 | 32437 | Z95586 | Mycobacterium tuberculosis H37Rv complete genome: segment 70/162. | Mycobacterium tuberculosis | 39,504 | 24-Jun-99 |
| rxa02118 | 465 | GB_HTG2: AC007164 | 158320 | AC007164 | Homo sapiens clone NH0304A10, *** SEQUENCING IN PROGRESS ***, 3 | Homo sapiens | 38,377 | 23-Apr-99 |
| | | | | | unordered pieces. | | | |
| rxa02120 | 885 | GB_PL2: PUMCDC2A | 1288 | L34206 | Petroselinum crispum protein kinase p34cdc2 (cdc2) mRNA, complete cds. | Petroselinum crispum | 37,816 | 17-Feb-96 |
| | | GB_GSS10: AQ214799 | 431 | AQ214799 | HS_3010_A2_G12_MR CIT Approved Human Genomic Sperm Library D | Homo sapiens | 34,591 | 18-Sep-98 |
| | | | | | Homo sapiens genomic clone Plate = 3010 Col = 24 Row = M, genomic survey | | | |
| | | | | | sequence. | | | |
| | | GB_PL2: PUMCDC2A | 1288 | L34206 | Petroselinum crispum protein kinase p34cdc2 (cdc2) mRNA, complete cds. | Petroselinum crispum | 36,541 | 17-Feb-96 |
| rxa02126 | 444 | GB_GSS4: AQ707596 | 485 | AQ707596 | HS_5560_B1_H08_SP6E RPCI-11 Human Male BAC Library Homo | Homo sapiens | 38,482 | 7-Jul-99 |
| | | | | | sapiens genomic clone Plate = 1136 Col = 15 Row = P, genomic survey | | | |
| | | | | | sequence. | | | |
| | | GB_GSS13: AQ494885 | 411 | AQ494885 | HS_5195_A1_B11_SP6E RPCI-11 Human Male BAC Library Homo | Homo sapiens | 40,897 | 28-Apr-99 |
| | | | | | sapiens genomic clone Plate = 771 Col = 21 Row = C, genomic | | | |
| | | | | | survey sequence. | | | |
| | | GB_GSS4: AQ707596 | 485 | AQ707596 | HS_5560_B1_H08_SP6E RPCI-11 Human Male BAC Library Homo | Homo sapiens | 43,533 | 7-Jul-99 |
| | | | | | sapiens genomic clone Plate = 1136 Col = 15 Row = P, genomic survey | | | |
| | | | | | sequence. | | | |
| rxa02148 | 1266 | GB_HTG2: AC007905 | 100722 | AC007905 | Homo sapiens chromosome 16q24.3 clone PAC 754F23, *** SEQUENCING | Homo sapiens | 36,051 | 24-Jun-99 |
| | | | | | IN PROGRESS ***, 33 unordered pieces. | | | |
| | | GB_HTG2: AC007905 | 100722 | AC007905 | Homo sapiens chromosome 16q24.3 clone PAC 754F23, *** SEQUENCING | Homo sapiens | 36,051 | 24-Jun-99 |
| | | | | | IN PROGRESS ***, 33 unordered pieces. | | | |
| | | GB_HTG2: AC007905 | 100722 | AC007905 | Homo sapiens chromosome 16q24.3 clone PAC 754F23, *** SEQUENCING | Homo sapiens | 35,402 | 24-Jun-99 |
| | | | | | IN PROGRESS ***, 33 unordered pieces. | | | |
| rxa02214 | 732 | GB_GSS13: AQ459868 | 402 | AQ459868 | HS_5116_A1_H04_SP6E RPCI-11 Human Male BAC Library Homo | Homo sapiens | 43,035 | 23-Apr-99 |
| | | | | | sapiens genomic clone Plate = 692 Col = 7 Row = O, genomic survey | | | |
| | | | | | sequence. | | | |
| | | GB_EST26: AU005050 | 790 | AU005050 | AU005050 Bombyx mori p50(Daizo) Bombyx mori cDNA clone ws30188, | Bombyx mori | 45,902 | 19-Jan-99 |
| | | | | | mRNA sequence. | | | |
| | | GB_PL2: F8K7 | 98581 | AC007727 | Arabidopsis thaliana chromosome 1 BAC F8K7 sequence, complete | Arabidopsis thaliana | 37,155 | 29-Jun-99 |
| | | | | | sequence. | | | |
| rxa02316 | 1137 | GB_EST32: AI723424 | 600 | AI723424 | hcgls49.T7 Haemonchus contortus Intestinal mRNA Haemonchus contortus | Haemonchus contortus | 35,953 | 10-Jun-99 |
| | | | | | cDNA clone hcgls49.T7 T7, mRNA sequence. | | | |
| | | GB_PR4: AC000134 | 203300 | AC000134 | Homo sapiens Chromosome 11q13 BAC Clone 137c7, complete sequence. | Homo sapiens | 37,030 | 06-MAY-1999 |
| | | GB_STS: AF021124 | 575 | AF021124 | Homo sapiens trinucleotide repeat ctg-68, sequence tagged site. | Homo sapiens | 41,913 | 3-Apr-98 |
| rxa02384 | 831 | GB_PL1: ATA224957 | 4081 | AJ224957 | Arabidopsis thaliana RGAL gene. | Arabidopsis thaliana | 35,627 | 19-MAY-1998 |
| | | GB_RO: AF022770 | 577 | AF022770 | Mus musculus peripherial benzodiazepine receptor associated protein | Mus musculus | 39,652 | 24-Sep-97 |
| | | | | | (Pap7) mRNA, partial cds. | | | |
| | | GB_GSS11: AQ258908 | 890 | AQ258908 | nbxb0021F23r CUGI Rice BAC Library Oryza sativa genomic clone | Oryza sativa | 39,515 | 23-OCT-1998 |
| | | | | | nbxb0021F23r, genomic survey sequence. | | | |
| rxa02411 | 972 | GB_BA1: AB020624 | 1605 | AB020624 | Corynebacterium glutamicum murl gene for D-glutamate racemase, | Corynebacterium glutamicum | 98,868 | 24-Jul-99 |
| | | | | | complete cds. | | | |
| | | GB_EST18: AA733776 | 385 | AA733776 | vv03f03.r1 Stratagene mouse skin (#937313) Mus musculus cDNA clone | Mus musculus | 43,864 | 7-Jan-98 |
| | | | | | IMAGE: 1210589 5′, mRNA sequence. | | | |
| | | GB_EST38: AW033449 | 612 | AW033449 | EST277020 tomato callus, TAMU Lycopersicon esculentum cDNA clone | Lycopersicon esculentum | 35,620 | 15-Sep-99 |
| | | | | | cLEC28F5, mRNA sequence. | | | |
| rxa02448 | 1212 | GB_BA1: AB016258 | 2260 | AB016258 | Arthrobacter sp. gene for maleylacetate reductase and hydroxyquinol 1,2- | Arthrobacter sp. | 60,465 | 8-Sep-99 |
| | | | | | dioxygenase, partial and complete cds. | | | |
| | | GB_EST37: AW014148 | 553 | AW014148 | UI-H-BI0-aaj-c-04-0-UI.s1 NCI_CGAP_Sub1 Homo sapiens cDNA clone | Homo sapiens | 44,560 | 10-Sep-99 |
| | | | | | IMAGE: 2709487 3′, mRNA sequence. | | | |
| | | GB_EST14: AA432042 | 543 | AA432042 | zw80f01.r1 Soares_testis_NHT Homo sapiens cDNA clone IMAGE: 782521 | Homo sapiens | 36,522 | 22-MAY-1997 |
| | | | | | 5′ similar to WP: T12A7.1 CE06433;, mRNA sequence. | | | |
| rxa02449 | 1026 | GB_BA1: AB016258 | 2260 | AB016258 | Arthrobacter sp. gene for maleylacetate reductase and hydroxyquinol 1,2- | Arthrobacter sp. | 66,244 | 8-Sep-99 |
| | | | | | dioxygenase, partial and complete cds. | | | |
| | | GB_BA1: CGPUTP | 3791 | Y09163 | C. glutamicum putP gene. | Corynebacterium glutamicum | 39,899 | 8-Sep-97 |
| | | GB_BA1: AB016258 | 2260 | AB016258 | Arthrobacter sp. gene for maleylacetate reductase and hydroxyquinol 1,2- | Arthrobacter sp. | 70,410 | 8-Sep-99 |
| | | | | | dioxygenase, partial and complete cds. | | | |
| rxa02497 | 1050 | GB_BA2: CGU31224 | 422 | U31224 | Corynebacterium glutamicum (ppx) gene, partial cds. | Corynebacterium glutamicum | 96,445 | 2-Aug-96 |
| | | GB_BA1: MTCY20G9 | 37218 | Z77162 | Mycobacterium tuberculosis H37Rv complete genome; segment 25/162. | Mycobacterium tuberculosis | 59,429 | 17-Jun-98 |
| | | GB_BA1: SCE7 | 16911 | AL049819 | Streptomyces coelicolor cosmid E7. | Streptomyces coelicolor | 39,510 | 10-MAY-1999 |
| rxa02526 | 1329 | GB_GSS10: AQ240233 | 483 | AQ240233 | CIT-HSP-2385F9.TR.1 CIT-HSP Homo sapiens genomic clone 2385F9, | Homo sapiens | 42,475 | 30-Sep-98 |
| | | | | | genomic survey sequence. | | | |
| | | GB_OV: S48556 | 195 | S48556 | {tandem repeat P1 monomer} [Cacatua galerita = sulfur-crested cockatoo, | Cacatua galerita | 50,515 | 08-MAY-1993 |
| | | | | | Genomic, 195 nt]. | | | |
| | | GB_PR2: HSM801056 | 2555 | AL117532 | Homo sapiens mRNA; cDNA DKFZp434E192 (from clone DKFZp434E192). | Homo sapiens | 39,116 | 15-Sep-99 |
| rxa02530 | 780 | GB_PR3: HSJ753D10 | 97912 | AL049651 | Human DNA sequence from clone 753D10 on chromosome 20 Contains | Homo sapiens | 34,248 | 23-Nov-99 |
| | | | | | genes for SSTR4(somatostatin receptor 4) and THBD(thrombomodulin), | | | |
| | | | | | ESTs, STSs, GSSs and CpG islands, complete sequence. | | | |
| | | GB_EST33: AI782764 | 661 | AI782764 | EST263643 tomato susceptible, Cornell Lycopersicon esculentum cDNA | Lycopersicon esculentum | 35,385 | 29-Jun-99 |
| | | | | | clone cLES20B10, mRNA sequence. | | | |
| | | GB_GSS9: AQ121479 | 521 | AQ121479 | HS_3084_A2_B02_MF CIT Approved Human Genomic Sperm Library D | Homo sapiens | 38,689 | 22-Sep-98 |
| | | | | | Homo sapiens genomic clone Plate = 3084 Col = 4 Row = C, genomic survey | | | |
| | | | | | sequence. | | | |
| rxa02535 | 1278 | GB_HTG3: AC008710 | 146065 | AC008710 | Homo sapiens chromosome 5 clone CIT978SKB_7E3, *** SEQUENCING | Homo sapiens | 35,799 | 3-Aug-99 |
| | | | | | IN PROGRESS ***, 39 unordered pieces. | | | |
| | | GB_HTG3: AC008710 | 146065 | AC008710 | Homo sapiens chromosome 5 clone CIT978SKB_7E3, *** SEQUENCING | Homo sapiens | 35,799 | 3-Aug-99 |
| | | | | | IN PROGRESS ***, 39 unordered pieces. | | | |
| | | GB_HTG3: AC008710 | 146065 | AC008710 | Homo sapiens chromosome 5 clone CIT978SKB_7E3, *** SEQUENCING | Homo sapiens | 34,886 | 3-Aug-99 |
| | | | | | IN PROGRESS ***, 39 unordered pieces. | | | |
| rxa02603 | 1119 | GB_BA1: MTV026 | 23740 | AL022076 | Mycobacterium tuberculosis H37Rv complete genome; segment 157/162. | Mycobacterium tuberculosis | 37,975 | 24-Jun-99 |
| | | GB_IN2: AC005714 | 177740 | AC005714 | Drosophila melanogaster, chromosome 2R, region 58D4-58E2, BAC clone | Drosophila melanogaster | 41,226 | 01-MAY-1999 |
| | | | | | BACR48M13, complete sequence. | | | |
| | | GB_EST19: AA775050 | 218 | AA775050 | ac76e10.s1 Stratagene lung (#937210) Homo sapiens cDNA clone | Homo sapiens | 40,826 | 5-Feb-98 |
| | | | | | IMAGE: 868554 3′ similar to gb: Y00371_rna1 HEAT SHOCK | | | |
| | | | | | COGNATE 71 KD PROTEIN (HUMAN);, mRNA sequence. | | | |
| rxa02641 | | | | | | | | |
| rxa02651 | 1053 | GB_BA1: MTCY48 | 35377 | Z74020 | Mycobacterium tuberculosis H37Rv complete genome; segment 69/162. | Mycobacterium tuberculosis | 62,678 | 17-Jun-98 |
| | | GB_BA1: SC4A10 | 43147 | AL109663 | Streptomyces coelicolor cosmid 4A10. | Streptomyces coelicolor | 39,109 | 5-Aug-99 |
| | | | | | | A3(2) | | |
| | | GB_BA1: MLCL458 | 43839 | AL049478 | Mycobacterium leprae cosmid L458. | Mycobacterium leprae | 62,753 | 27-Aug-99 |
| rxa02674 | 1575 | GB_BA2: PPU96338 | 5276 | U96338 | Pseudomonas putida NCIMB 9866 plasmid pRA4000 p-cresol degradative | Pseudomonas putida | 58,095 | 13-MAY-1999 |
| | | | | | pathway genes, p-hydroxybenzaldehyde dehydrogenase (pchA), p-cresol | | | |
| | | | | | methylhydroxylase, cytochrome subunit precursor (pchC), unknown (pchX) | | | |
| | | | | | and p-cresol methylhydroxylase, flavoprotein subunit (pchF) genes, | | | |
| | | | | | complete cds. | | | |
| | | GB_BA1: SCE9 | 37730 | AL049841 | Streptomyces coelicolor cosmid E9. | Streptomyces coelicolor | 38,544 | 19-MAY-1999 |
| | | GB_BA2: PPU96339 | 4464 | U96339 | Pseudomonas putida NCIMB 9869 plasmid pRA500 p-cresol degradative | Pseudomonas putida | 70,588 | 13-MAY-1999 |
| | | | | | pathway genes, p-hydroxybenzaldehyde dehydrogenase (pchA) gene, | | | |
| | | | | | partial cds, and p-cresol methylhydroxylase, cytochrome subunit (pchC), | | | |
| | | | | | unknown (pchX), p-cresol methylhydroxylase, flavoprotein subunit (pchF), | | | |
| | | | | | protocatechuate-3,4-dioxygenase, beta subunit (pcaH) and protocatechuate- | | | |
| | | | | | 3,4-dioxygenase, alpha subunit (pcaG) genes, complete cds. | | | |
| rxa02702 | 1581 | GB_BA1: AB015023 | 2291 | AB015023 | Corynebacterium glutamicum genes for MurC and FtsQ, complete cds. | Corynebacterium glutamicum | 99,365 | 6-Feb-99 |
| | | GB_BA1: AB003132 | 4116 | AB003132 | Corynebacterium glutamicum gene for MurC, FtsQ, FtsZ, complete cds. | Corynebacterium glutamicum | 99,317 | 4-Aug-97 |
| | | GB_BA1: BLFTSZ | 5546 | Y08964 | B. lactofermentum murC, ftsQ or divD & ftsZ genes. | Corynebacterium glutamicum | 99,296 | 08-OCT-1998 |
| rxa02703 | 1212 | GB_BA1: AB015023 | 2291 | AB015023 | Corynebacterium glutamicum genes for MurC and FtsQ, complete cds. | Corynebacterium glutamicum | 97,468 | 6-Feb-99 |
| | | GB_PL2: VFAMACTRA | 1879 | Y09591 | V. faba mRNA for amino acid transporter. | Vicia faba | 38,915 | 02-DEC-1999 |
| | | GB_PAT: E05047 | 966 | E05047 | DNA encoding recombinant monoglyceride lipase. | Bacillus sp. | 37,158 | 29-Sep-97 |
| rxa02704 | 1812 | GB_BA1: MTCY270 | 37586 | Z95388 | Mycobacterium tuberculosis H37Rv complete genome; segment 96/162. | Mycobacterium tuberculosis | 37,946 | 10-Feb-99 |
| | | GB_BA2: AE000961 | 18765 | AE000961 | Archaeoglobus fulgidus section 146 of 172 of the complete genome. | Archaeoglobus fulgidus | 38,521 | 15-DEC-1997 |
| | | GB_BA1: MTCY270 | 37586 | Z95388 | Mycobacterium tuberculosis H37Rv complete genome; segment 96/162. | Mycobacterium tuberculosis | 37,850 | 10-Feb-99 |
| rxa02705 | 1539 | GB_PAT: I26124 | 6911 | I26124 | Sequence 4 from patent US 5556776. | Unknown. | 97,619 | 07-OCT-1996 |
| | | EM_PAT: E11760 | 6911 | E11760 | Base sequence of sucrase gene. | Corynebacterium glutamicum | 97,619 | 08-OCT-1997 |
| | | | | | | | | (Rel. 52, |
| | | | | | | | | Created) |
| | | GB_BA1: SC4A10 | 43147 | AL109663 | Streptomyces coelicolor cosmid 4A10. | Streptomyces coelicolor | 37,856 | 5-Aug-99 |
| | | | | | | A3(2) | | |
| rxa02706 | 1221 | GB_PAT: I26124 | 6911 | I26124 | Sequence 4 from patent US 5556776. | Unknown. | 98,605 | 07-OCT-1996 |
| | | EM_PAT: E11760 | 6911 | E11760 | Base sequence of sucrase gene. | Corynebacterium glutamicum | 98,605 | 08-OCT-1997 |
| | | | | | | | | (Rel. 52, |
| | | | | | | | | Created) |
| | | GB_BA1: MTCY270 | 37586 | Z95388 | Mycobacterium tuberculosis H37Rv complete genome; segment 96/162. | Mycobacterium tuberculosis | 34,868 | 10-Feb-99 |
| rxa02707 | 1653 | EM_PAT: E11760 | 6911 | E11760 | Base sequence of sucrase gene. | Corynebacterium glutamicum | 98,547 | 08-OCT-1997 |
| | | | | | | | | (Rel. 52, |
| | | | | | | | | Created) |
| | | GB_PAT: I26124 | 6911 | I26124 | Sequence 4 from patent US 5556776. | Unknown. | 98,547 | 07-OCT-1996 |
| | | GB_BA1: MLCB268 | 38859 | AL022602 | Mycobacterium leprae cosmid B268. | Mycobacterium leprae | 37,815 | 27-Aug-99 |
| rxa02710 | 1686 | EM_PAT: E11760 | 6911 | E11760 | Base sequence of sucrase gene | Corynebacterium glutamicum | 52,124 | 08-OCT-1997 |
| | | | | | | | | (Rel. 52, |
| | | | | | | | | Created) |
| | | GB_PAT: I26124 | 6911 | I26124 | Sequence 4 from patent US 5556776. | Unknown. | 52,124 | 07-OCT-1996 |
| | | GB_GSS13: AQ484169 | 515 | AQ484169 | RPCI-11-264A12.TV RPCI-11 Homo sapiens genomic clone RPCI-11- | Homo sapiens | 40,856 | 24-Apr-99 |
| | | | | | 264A12, genomic survey sequence. | | | |
| rxa02711 | 2235 | GB_BA2: XCU45994 | 1203 | U45994 | Xanthomonas campestris pv. campestris insertion sequence IS1404. | Xanthomonas campestris pv. | 39,061 | 29-Jan-99 |
| | | | | | | campestris | | |
| | | GB_BA2: XCU77781 | 4160 | U77781 | Xanthomonas campestris pv. amaranthicola Xaml DNA methyltransferase | Xanthomonas campestris pv. | 39,551 | 9-Feb-99 |
| | | | | | (xamlM) gene, complete cds; insertion sequence IS1389 and unknown | amaranthicola | | |
| | | | | | genes. | | | |
| | | GB_BA2: AF108355 | 1222 | AF108355 | Xanthomonas campestris pv. amaranthicola insertion sequence IS1389-B | Xanthomonas campestris pv. | 40,281 | 09-MAR-1999 |
| | | | | | unknown genes. | amaranthicola | | |
| rxa02713 | 1134 | GB_BA1: MTCY270 | 37586 | Z95388 | Mycobacterium tuberculosis H37Rv complete genome; segment 96/162. | Mycobacterium tuberculosis | 38,669 | 10-Feb-99 |
| | | GB_PR1: D31907 | 599 | D31907 | Homo sapiens gene for zinc regulatory factor, partial cds. | Homo sapiens | 36,396 | 7-Feb-99 |
| | | GB_PR1: HSMTFMR | 3302 | X78710 | H. sapiens MTF-1 mRNA for metal-regulatory transcription factor. | Homo sapiens | 37,243 | 1-Aug-94 |
| rxa02716 | 684 | GB_PR3: AC002347 | 134977 | AC002347 | Homo sapiens chromosome 17, clone 297N7, complete sequence. | Homo sapiens | 36,282 | 3-Feb-98 |
| | | GB_PR3: HS310J6 | 87942 | AL035593 | Human DNA sequence from clone 310J6 on chromosome 6q22.1-22.3. | Homo sapiens | 37,291 | 23-Nov-99 |
| | | | | | Contains part of a novel gene, ESTs, STSs and GSSs, complete sequence. | | | |
| | | GB_HTG3: AC011509 | 111353 | AC011509 | Homo sapiens chromosome 19 clone CITB-H1_2189E23, *** | Homo sapiens | 37,407 | 07-OCT-1999 |
| | | | | | SEQUENCING IN PROGRESS ***, 35 unordered pieces. | | | |
| rxa02722 | 1449 | GB_BA1: BLFTSZ | 5546 | Y08964 | B. lactofermentum murC, ftsQ or divD & ftsZ genes. | Corynebacterium glutamicum | 99,652 | 08-OCT-1998 |
| | | GB_BA1: AB003132 | 4116 | AB003132 | Corynebacterium glutamicum gene for MurC, FtsQ, FtsZ, complete cds. | Corynebacterium glutamicum | 98,535 | 4-Aug-97 |
| | | GB_PAT: E17182 | 1125 | E17182 | Brevibacterium flavum ftsQ gene complete cds. | Corynebacterium glutamicum | 97,235 | 28-Jul-99 |
| rxa02723 | 789 | GB_BA1: AB015023 | 2291 | AB015023 | Corynebacterium glutamicum genes for MurC and FtsQ, complete cds. | Corynebacterium glutamicum | 99,113 | 6-Feb-99 |
| | | GB_BA1: BLFTSZ | 5546 | Y08964 | B. lactofermentum murC, ftsQ or divD & ftsZ genes. | Corynebacterium glutamicum | 99,113 | 08-OCT-1998 |
| | | GB_BA1: AB003132 | 4116 | AB003132 | Corynebacterium glutamicum gene for MurC, FtsQ, FtsZ, complete cds. | Corynebacterium glutamicum | 99,113 | 4-Aug-97 |
| rxa02813 | 1108 | GB_HTG3: AC009658 | 171795 | AC009658 | Homo sapiens chromosome 15 clone 344_A_16 map 15, *** SEQUENCING | Homo sapiens | 34,622 | 01-OCT-1999 |
| | | | | | IN PROGRESS ***, 29 unordered pieces. | | | |
| | | GB_HTG3: AC009658 | 171795 | AC009658 | Homo sapiens chromosome 15 clone 344_A_16 map 15, *** SEQUENCING | Homo sapiens | 34,622 | 01-OCT-1999 |
| | | | | | IN PROGRESS ***, 29 unordered pieces. | | | |
| | | GB_RO: MMU65079 | 2300 | U65079 | Mus musculus actin-binding protein (ENC-1) mRNA, complete cds. | Mus musculus | 35,013 | 29-Jul-97 |
| rxa02820 | 1411 | GB_BA1: BFU64514 | 3837 | U64514 | Bacillus firmus dppABC operon, dipeptide transporter protein dppA gene, | Bacillus firmus | 36,859 | 1-Feb-97 |
| | | | | | partial cds, and dipeptide transporter proteins dppB and dppC genes, | | | |
| | | | | | complete cds. | | | |
| | | GB_IN1: CET04C10 | 20958 | Z69885 | Caenorhabditis elegans cosmid T04C10, complete sequence. | Caenorhabditis elegans | 35,934 | 2-Sep-99 |
| | | GB_EST35: AI823090 | 720 | AI823090 | L30-944T3 Ice plant Lambda Uni-Zap XR expression library, 30 hours NaCl | Mesembryanthemum | 35,770 | 21-Jul-99 |
| | | | | | treatment Mesembryanthemum crystallinum cDNA clone L30-944 5′ similar | crystallinum | | |
| | | | | | to 60S ribosomal protein L36 (AC004684)[Arabidopsis thaliana], mRNA | | | |
| | | | | | sequence. | | | |
| rxa02828 | 572 | GB_BA1: MTCY10H4 | 39160 | Z80233 | Mycobacterium tuberculosis H37Rv complete genome; segment 2/162. | Mycobacterium tuberculosis | 39,823 | 17-Jun-98 |
| | | GB_BA1: MTORIREP | 8400 | X92504 | M. tuberculosis origin of replication and genes rnpA, rpmH, dnaA, dnaN, | Mycobacterium tuberculosis | 39,823 | 26-Aug-97 |
| | | | | | recF. | | | |
| | | GB_RO: RATENDOGLY | 3906 | L37380 | Rat apical endosomal glycoprotein mRNA, complete cds. | Rattus norvegicus | 38,704 | 20-Apr-95 |
| rxa02839 | 470 | GB_BA2: ECOUW89 | 176195 | U00006 | E. coli chromosomal region from 89.2 to 92.8 minutes. | Escherichia coli | 99,362 | 17-DEC-1993 |
| | | GB_BA2: AE000477 | 11314 | AE000477 | Escherichia coli K-12 MG1655 section 367 of 400 of the complete genome. | Escherichia coli | 99,787 | 12-Nov-98 |
| | | GB_BA1: ECOPLSB | 3865 | K00127 | E. coli plsB and dgk genes coding for sn-glycerol-3-phosphate | Escherichia coli | 33,761 | 28-Feb-94 |
| | | | | | acyltransferase and diglyceride kinase. | | | |
| rxs03218 | | | | | | | | |

1. An isolated nucleic acid molecule from Corynebacterium glutamicum encoding an HA protein, or a portion thereof, provided that the nucleic acid molecule does not consist of any of the F-designated genes set forth in Table 1.

2. The isolated nucleic acid molecule of claim 1, wherein said nucleic acid molecule encodes an HA protein involved in the production of a fine chemical.

3. An isolated Corynebacterium glutamicum nucleic acid molecule selected from the group consisting of those sequences set forth in Appendix A, or a portion thereof, provided that the nucleic acid molecule does not consist of any of the F-designated genes set forth in Table 1.

4. An isolated nucleic acid molecule which encodes a polypeptide sequence selected from the group consisting of those sequences set forth in Appendix B, provided that the nucleic acid molecule does not consist of any of the F-designated genes set forth in Table 1.

5. An isolated nucleic acid molecule which encodes a naturally occurring allelic variant of a polypeptide selected from the group of amino acid sequences consisting of those sequences set forth in Appendix B, provided that the nucleic acid molecule does not consist of any of the F-designated genes set forth in Table 1.

6. An isolated nucleic acid molecule comprising a nucleotide sequence which is at least 50% homologous to a nucleotide sequence selected from the group consisting of those sequences set forth in Appendix A, or a portion thereof, provided that the nucleic acid molecule does not consist of any of the F-designated genes set forth in Table 1.

7. An isolated nucleic acid molecule comprising a fragment of at least 15 nucleotides of a nucleic acid comprising a nucleotide sequence selected from the group consisting of those sequences set forth in Appendix A, provided that the nucleic acid molecule does not consist of any of the F-designated genes set forth in Table 1.

8. An isolated nucleic acid molecule which hybridizes to the nucleic acid molecule of any one of claims 1-7 under stringent conditions.

9. An isolated nucleic acid molecule comprising the nucleic acid molecule of claim 1 or a portion thereof and a nucleotide sequence encoding a heterologous polypeptide.

10. A vector comprising the nucleic acid molecule of claim 1.

11. The vector of claim 10, which is an expression vector.

12. A host cell transfected with the expression vector of claim 11.

13. The host cell of claim 12, wherein said cell is a microorganism.

14. The host cell of claim 13, wherein said cell belongs to the genus Corynebacterium or Brevibacterium.

15. The host cell of claim 12, wherein the expression of said nucleic acid molecule results in the modulation in production of a fine chemical from said cell.

16. The host cell of claim 15, wherein said fine chemical is selected from the group consisting of: organic acids, proteinogenic and nonproteinogenic amino acids, purine and pyrimidine bases, nucleosides, nucleotides, lipids, saturated and unsaturated fatty acids, diols, carbohydrates, aromatic compounds, vitamins, cofactors, polyketides, and enzymes.

17. A method of producing a polypeptide comprising culturing the host cell of claim 12 in an appropriate culture medium to, thereby, produce the polypeptide.

18. An isolated HA polypeptide from Corynebacterium glutamicum, or a portion thereof.

19. The polypeptide of claim 18, wherein said polypeptide is involved in the production of a fine chemical production.

20. An isolated polypeptide comprising an amino acid sequence selected from the group consisting of those sequences set forth in Appendix B, provided that the amino acid sequence is not encoded by any of the F-designated genes set forth in Table 1.

21. An isolated polypeptide comprising a naturally occurring allelic variant of a polypeptide comprising an amino acid sequence selected from the group consisting of those sequences set forth in Appendix B, or a portion thereof, provided that the amino acid sequence is not encoded by any of the F-designated genes set forth in Table 1.

22. The isolated polypeptide of claim 18, further comprising heterologous amino acid sequences.

23. An isolated polypeptide which is encoded by a nucleic acid molecule comprising a nucleotide sequence which is at least 50% homologous to a nucleic acid selected from the group consisting of those sequences set forth in Appendix A, provided that the nucleic acid molecule does not consist of any of the F-designated nucleic acid molecules set forth in Table 1.

24. An isolated polypeptide comprising an amino acid sequence which is at least 50% homologous to an amino acid sequence selected from the group consisting of those sequences set forth in Appendix B, provided that the amino acid sequence is not encoded by any of the F-designated genes set forth in Table 1.

25. A method for producing a fine chemical, comprising culturing a cell containing a vector of claim 12 such that the fine chemical is produced.

26. The method of claim 25, wherein said method further comprises the step of recovering the fine chemical from said culture.

27. The method of claim 25, wherein said method further comprises the step of transfecting said cell with the vector of claim 11 to result in a cell containing said vector.

28. The method of claim 25, wherein said cell belongs to the genus Corynebacterium or Brevibacterium.

29. The method of claim 25, wherein said cell is selected from the group consisting of: Corynebacterium glutamicum, Corynebacterium herculis, Corynebacterium lilium, Corynebacterium acetoacidophilum, Corynebacterium acetoglutamicum, Corynebacterium acetophilum, Corynebacterium ammoniagenes, Corynebacterium fujiokense, Corynebacterium nitrilophilus, Brevibacterium ammoniagenes, Brevibacterium butanicum, Brevibacterium divaricatum, Brevibacterium flavum, Brevibacterium healii, Brevibacterium ketoglutamicum, Brevibacterium ketosoreductum, Brevibacterium lactofermentum, Brevibacterium linens, Brevibacterium paraffinolyticum, and those strains set forth in Table 3.

30. The method of claim 25, wherein expression of the nucleic acid molecule from said vector results in modulation of production of said fine chemical.

31. The method of claim 25, wherein said fine chemical is selected from the group consisting of: organic acids, proteinogenic and nonproteinogenic amino acids, purine and pyrimidine bases, nucleosides, nucleotides, lipids, saturated and unsaturated fatty acids, diols, carbohydrates, aromatic compounds, vitamins, cofactors, polyketides, and enzymes.

32. The method of claim 25, wherein said fine chemical is an amino acid.

33. The method of claim 32, wherein said amino acid is drawn from the group consisting of: lysine, glutamate, glutamine, alanine, aspartate, glycine, serine, threonine, methionine, cysteine, valine, leucine, isoleucine, arginine, proline, histidine, tyrosine, phenylalanine, and tryptophan.

34. A method for producing a fine chemical, comprising culturing a cell whose genomic DNA has been altered by the inclusion of a nucleic acid molecule of any one of claims 1-9.

35. A method for diagnosing the presence or activity of Corynebacterium diphtheriae in a subject, comprising detecting the presence of one or more of the sequences set forth in Appendix A or Appendix B in the subject, provided that the sequences are not or are not encoded by any of the F-designated sequences set forth in Table 1, thereby diagnosing the presence or activity of Corynebacterium diphtheriae in the subject.

36. A host cell comprising a nucleic acid molecule selected from the group consisting of the nucleic acid molecules set forth in Appendix A, wherein the nucleic acid molecule is disrupted.

37. A host cell comprising a nucleic acid molecule selected from the group consisting of the nucleic acid molecules set forth in Appendix A, wherein the nucleic acid molecule comprises one or more nucleic acid modifications from the sequence set forth in Appendix A.

38. A host cell comprising a nucleic acid molecule selected from the group consisting of the nucleic acid molecules set forth in Appendix A, wherein the regulatory region of the nucleic acid molecule is modified relative to the wild-type regulatory region of the molecule.

The application's sequence listing, which the Patent Office published only in electronic form, follows.

SEQUENCE LISTING (480 sequences)

SEQ ID NO: 1 - DNA, 1581 bp, Corynebacterium glutamicum
  CDS (101)..(1558): RXA02702
gcaggtaacgcctccacggtgattgcagacatgattgctgcaactatcaatagccaacacaactaaaacgaccagctcaacgcaaaggaatagtttaaaggtgaccactccacacttggattctgcacaagatattgatctgtcccgcgtccacctcatcggtattggcggagccggaatgtctggcgttgcccgaatcctgcttgcccgcggtaagacagtcactggttccgatgccaaagattcccgcaccttgcttccactccgcgccgtgggagccaccatcgcagtgggacacgctgcggaaaaccttgagctttccggcgaacttcccaccgtcgtggtgacctcttttgccgccattccgcaagacaacccggaacttgttcgtgcacgtgaagaaggcattccggttattcgtcgctccgatctgttgggcgaattgctggaaggctccacccaggtcttgatcgcgggtacccacggtaagacctccaccacctctatgtctgtggtagctatgcaggcagcgggcatggatccaagctttgctatcggcggacagctcaacaaggctggcaccaatgcgcaccatggaactggtgaggtctttatcgctgaagcagatgaatctgacgcatcgctgctgcgctacaagccaaatgttgcagtggtcaccaatgtggaaccagaccacctggacttctttaaaacccctgaagcctacttccaagtgttcgacgatttcgcaggacgcatcaccccgaacggcaagctggttgtgtgcctgaacgatcctcacgcagcggagctgggggagaggtctgtccgcaagggtatcaagactgttggttacggtaccgctgacgccgtacaggcacaccctgaggttccagcgatggctaccatcgtggattcccaagttgtcgcagaaggcacccgcgccaccatcaacatcgatggacaggaagtatctgtgattcttcaaatccctggtgatcacatggtactcaacggtgcagccgccctgctggccggatacctggtgggtggggacgtcgacaagcttgttgaaggcttgtcggatttctccggcgtgcgacgccgctttgagttccacggtgctatcgagggcggcaaatttaatggcgctgctatttatgatgattacgcacaccacccaacggaagtaactgcagtgctcagcgctgcgcgcacccgggtgaaggccgctggaaagggccgtgtcatcgtcgcgttccaaccacatttatactcacgcaccatagaattccaaaaggagttcgcgggggcactgtcactggcagacgctgccgtggtgcttgagatttacggagcgcgcgaacaaccggtggatggcgtgtcctcggaaatcatcaccgatgcgatgaccattccagtggtgtacgaacctaatttctctgcagtcccagaacgcattgcagaaatcgcaggacctaatgacatcgtgctcaccatgggtgcaggttccgtgaccatgcttgctccagaaatcctggatcagctgcaaaacaattaggacgtaagtgaacaaggcag

SEQ ID NO: 2 - protein, 486 aa, Corynebacterium glutamicum
VTTPHLDSAQDIDLSRVHLIGIGGAGMSGVARILLARGKTVTGSDAKDSRTLLPLRAVGATIAVGHAAENLELSGELPTVVVTSFAAIPQDNPELVRAREEGIPVIRRSDLLGELLEGSTQVLIAGTHGKTSTTSMSVVAMQAAGMDPSFAIGGQLNKAGTNAHHGTGEVFIAEADESDASLLRYKPNVAVVTNVEPDHLDFFKTPEAYFQVFDDFAGRITPNGKLVVCLNDPHAAELGERSVRKGIKTVGYGTADAVQAHPEVPAMATIVDSQVVAEGTRATINIDGQEVSVILQIPGDHMVLNGAAALLAGYLVGGDVDKLVEGLSDFSGVRRRFEFHGAIEGGKFNGAAIYDDYAHHPTEVTAVLSAARTRVKAAGKGRVIVAFQPHLYSRTIEFQKEFAGALSLADAAVVLEIYGAREQPVDGVSSEIITDAMTIPVVYEPNFSAVPERIAEIAGPNDIVLTMGAGSVTMLAPEILDQLQNN

SEQ ID NO: 3 - DNA, 1539 bp, Corynebacterium glutamicum
  CDS (101)..(1516): RXA02705
cgtgaccatccgtttctggctgatcgcgatcatggctgtgttggcgggtgtcggtgtgttttacagcgactggctccacttagcggaggtataaataattatgggttctctgtcccatttacctcaggcgctgcagggccgtattcttgtggccggcgctggtgtttccggcctgtccattgcaaagatgctcagtgagttgcattgcgatgttgtggtcgccgacgataacgaaactgcacgtcacatgctcattgaagtagtagacgttgcagatatcagcaccgcgcaggctcaggaacagctggattctttctccattgtggtcacctccccgggctggcgcccaacaagcactttgcttgtcgacgcccaccgccagggccttgaggttatcggtgacgtcgagcttgcttggcgcctggaccaggcaggtgttttcggcgagccacatacgtggctcgcagtcaccggcaccaacggtaaaaccaccaccacatcaatgctcgccgcgatgatgaatgagggcggttttactgccaaggcagtgggcaatatcggcatcccggtgtctgaggctttggtagcgaaaaaccgcattgatgtgttagttgcagagctgtctagtttccaattgcactggtctccaaccttcacccctgatgctggcgtggtgctcaacttggctgaggatcacatcgattggcacggttccatgcgtgattatgcgttggccaagatggaagtgctcaagggcaaggtcgccatcattggggcagacgatccttatttggtgcagctgacttctgaagcagacttgagtggtctcattggatttaccgtcaatgagcctgcaaccggccagttgggtgtgaaagcgggggagctcgtcgataatgcctacggcaataatgtggtgcttgcatccgctgacggcattaatcccgccggccctgccggtgttttggacgctttggctgcagctgcggtggcgcgctcgcagggcgtggcacctgaggcgatcgcgcgtgcgttggattcttttgaggtggcaggccaccgtggccaggtcgtcgccgagcatgacggtgttcatttcattgacaactccaaggcgaccaacccccacgctgctgattctgcgctagctgggcatgattcagtcatttgggttgtcggcggacagctcaaaggcgcggacattgcgccactggtgaaaaagcacgaacagcgcatcaaggcagcattggtgttgggcgcagatcgtgctgaaatcgtggcagcgttgaaggaacacgcgtcgcaggcctctgtatttgtcactgacaagacggagccatttgaggcaatggaagaaatcgtcactgaggcatttagcatcagcgaacccggcgataccgtgttgcttgcccctgccgctgcgtctttggacatgttcaaaggcatgggccagcgtggcgacctctttgcacacaacatcattggcacaatcaaaggattaacggaagagaaaggctgatcatgaccaccggagcctca

SEQ ID NO: 4 - protein, 472 aa, Corynebacterium glutamicum
MGSLSHLPQALQGRILVAGAGVSGLSIAKMLSELHCDVVVADDNETARHMLIEVVDVADISTAQAQEQLDSFSIVVTSPGWRPTSTLLVDAHRQGLEVIGDVELAWRLDQAGVFGEPHTWLAVTGTNGKTTTTSMLAAMMNEGGFTAKAVGNIGIPVSEALVAKNRIDVLVAELSSFQLHWSPTFTPDAGVVLNLAEDHIDWHGSMRDYALAKMEVLKGKVAIIGADDPYLVQLTSEADLSGLIGFTVNEPATGQLGVKAGELVDNAYGNNVVLASADGINPAGPAGVLDALAAAAVARSQGVAPEAIARALDSFEVAGHRGQVVAEHDGVHFIDNSKATNPHAADSALAGHDSVIWVVGGQLKGADIAPLVKKHEQRIKAALVLGADRAEIVAALKEHASQASVFVTDKTEPFEAMEEIVTEAFSISEPGDTVLLAPAAASLDMFKGMGQRGDLFAHNIIGTIKGLTEEKG

SEQ ID NO: 5 - DNA, 1392 bp, Corynebacterium glutamicum
  CDS (101)..(1369): RXA01254
ccgatgttgccttcttagcagctgttaaaagggtaaaagaagggaagaaagtggacgtcgaaaagcgctagtgccacttgcttaactagactcgtttttcatgaagctttcactgcctgcacccctacgccgtttacgcagcgctgccgccatcatctcagcaaaagttgcgacatccgcgtccaaagccacaggtcgcggatccggtggcatgatcggcggactggtggccagcaaggtagacccggacatcatgtccaacctcatcaacaaccgcccaacagtgctggtcacgggcacaaatggcaagtccaccaccacccgcatgctggccgccgcgatgcgcagcacttacaccgtcgccaccaatgaaggcggcgacaacatggacgccggcatcatttctgcgctgctcgctggccgaaacgcctcacacgtggtcttggaagtcgatgagctgcacgtacccgccgccatcgaacgcctcaagcccgacgccctcgtgctgctcaacctttcccgcgaccagctcgaccgcgttggcgaaattaacaaaatcgaacgtgtcctgcgcgatgccgtgcgctctcgacctgagatgaccgtcatcgccaactgcgacgacgtcctcgttacctccgtggctttcgacgccgaaaacgtcatctgggtcggcgccggcaccggctggcaaggtgaatccgccacctgcccacgcaccgaatcccgcatcctccacgacggacgccactggagcgccgaaaagacgcttctcgacggccgcaccttcgcacgccccaccccctcatgggaggttgacggtgataccatccattcaccatccggcgatctcaccttggatctcaacctcccaggtcaggccaaccgtggcaacgcggcacaagcaatcgcagcctccaccgtatttaatgtgcccgtttcctccgcactgcccgcagtcaactccgtcaacaacgttgctggacgctattccaccatcactgtcggtgaacacaaggtccacctcctgctcgccaaaaacccagcaggctggcaagaagccctctccatggttgatcgcacagctgatggcttagtcatcgtcgtcaatggccaggttgccgacggcgaagacctctcctggctttgggacgtccgcttcgaagacttcgaaaacctctccgtcaaagcctccggcgagcgcggcaccgacctggcagtccgcctcacctacgccgaaatcgaccacgaactcatctccaaccccgtcgacgccatcgcagcctgccctcctggccgcatcgaagtcctcgccaactacaccgcattccgagacctcaaaaaggctctggagaaagggaccgaacaataatgaccaccctcaacatcggc

SEQ ID NO: 6 - protein, 423 aa, Corynebacterium glutamicum
MKLSLPAPLRRLRSAAAIISAKVATSASKATGRGSGGMIGGLVASKVDPDIMSNLINNRPTVLVTGTNGKSTTTRMLAAAMRSTYTVATNEGGDNMDAGIISALLAGRNASHVVLEVDELHVPAAIERLKPDALVLLNLSRDQLDRVGEINKIERVLRDAVRSRPEMTVIANCDDVLVTSVAFDAENVIWVGAGTGWQGESATCPRTESRILHDGRHWSAEKTLLDGRTFARPTPSWEVDGDTIHSPSGDLTLDLNLPGQANRGNAAQAIAASTVFNVPVSSALPAVNSVNNVAGRYSTITVGEHKVHLLLAKNPAGWQEALSMVDRTADGLVIVVNGQVADGEDLSWLWDVRFEDFENLSVKASGERGTDLAVRLTYAEIDHELISNPVDAIAACPPGRIEVLANYTAFRDLKKALEKGTEQ

SEQ ID NO: 7 - DNA, 1653 bp, Corynebacterium glutamicum
  CDS (101)..(1630): RXN02707
ttttgatgaccgcgaagaagttcgcgctgctttgacagaaaagctcaacaataaacttccccttactacggaagaaggataggccacagtcatgatcacaatgacccttggggaaatcgctgacatcgttggaggcaggcttactggcggtgctcaagaagatacgcttgtgagctccagcgtggagtttgattctcgatccctcacaccgggtggcttgtttttagcacttccgggtgctcgtgtagacggccatgattttgctgcaactgcaattgagaaaggtgcggttgcagtattggcagcccgtgaggttgacgtacctgcgatcgtcgtgcctccagtaaaaatccaggaatccaatgctgacatttatgctcatgatccagatgggcatggcgcggcggtagtggaggcgttgtctcggttggctcgccacgtggtggatatctgcgtggctggccatcaattgaacgttgtggctattactggttctgcgggaaagacttctacgaaggatttcatcgcgacggttcttgaccaagatgggccaactgtggctcctccgggctcgtttaacaatgagcttggtttgccacacaccgcgctccgctgcacaaccgatactaagtatttggtggctgagatgtccgcgcgtggcattggacatattaagcacctgacagagattgctccgccacggattgcagctgtgctcaacgtcggccatgcgcacctgggtgaatttggatcccgcgagaatatcgcgcaggcaaaaggcgagatcattgaagcgctgccctcgaagaaaacgagctcggtaccagtcctgaatactgatccttttgtcgcccggatggctccacgcactaaggcgcgcgtggtgtggtttaccaccgatgcaggccaagcaaaaaagtctgattattgggcaacgagtatttcactggacgctgttgcgcgggcaagctttacgctgaacacgaaggacggctcttggccggtcaccctgcaggtttttggtgagcaccaggttgctaatgcacttgctgctgctgccattgccatggaagctggcgtcgccccagaattggtggttgctggattggaagcacattcagctgcttccgcgcaccgcatggatgtaaagacccgtgccgacggcgtgaccatcatcaacgattcttacaacgcgaatcctgattctatgcgtgcaggtatcgcggctcttgcgtacacagctagtggtcgttctgaagcaacaagctgggcagtgcttggccaaatgggtgagcttggcgatgacgcctcggaagcccatgccgaacttggtgctgagctggctaaatacaatgttcaagaacttgtcgcagtgggggagaaccctaactgtgcagcacttgcagagtccgcagcgagcctgggtgtgagtactcacgtagtttcagacgttgatgcagcgctcgagttgctcgcaggccatattaagcgggatgatgtagtgctggttaaggcttcaaatgctgatcgcctgtggagggtcgcagaagcactacatggcatggtgccgggcctcaaaaacacaggtggctcggtcaacgacgattctcgtcggaacgtggaaggacagtagaaaacaatgcaacagattat

SEQ ID NO: 8 - protein, 510 aa, Corynebacterium glutamicum
MTLGEIADIVGGRLTGGAQEDTLVSSSVEFDSRSLTPGGLFLALPGARVDGHDFAATAIEKGAVAVLAAREVDVPAIVVPPVKIQESNADIYAHDPDGHGAAVVEALSRLARHVVDICVAGHQLNVVAITGSAGKTSTKDFIATVLDQDGPTVAPPGSFNNELGLPHTALRCTTDTKYLVAEMSARGIGHIKHLTEIAPPRIAAVLNVGHAHLGEFGSRENIAQAKGEIIEALPSKKTSSVPVLNTDPFVARMAPRTKARVVWFTTDAGQAKKSDYWATSISLDAVARASFTLNTKDGSWPVTLQVFGEHQVANALAAAAIAMEAGVAPELVVAGLEAHSAASAHRMDVKTRADGVTIINDSYNANPDSMRAGIAALAYTASGRSEATSWAVLGQMGELGDDASEAHAELGAELAKYNVQELVAVGENPNCAALAESAASLGVSTHVVSDVDAALELLAGHIKRDDVVLVKASNADRLWRVAEALHGMVPGLKNTGGSVNDDSRRNVEGQ

SEQ ID NO: 9 - DNA, 468 bp, Corynebacterium glutamicum
  CDS (101)..(445): FRXA02707
tacaacgcgaatcctgattctatgcgtgcaggtatcgcggctcttgcgtacacagctagtggtcgttctgaagcaacaaagctgggcagtgcttggccaaatgggtgagcttggcgatgacgcctcggaagcccatgccgaacttggtgctgagctggctaaatacaatgttcaagaacttgtcgcagtgggggagaaccctaactgtgcagcacttgcagagtccgcagcgagcctgggtgtgagtactcacgtagtttcagacgttgatgcagcgctcgagttgctcgcaggccatattaagcgggatgatgtagtgctggttaaggcttcaaatgctgatcgcctgtggagggtcgcagaagcactacatggcatggtgccgggcctcaaaaacacaggtggctcggtcaacgacgattctcgtcggaacgtggaaggacagtagaaaacaatgcaacagattat

SEQ ID NO: 10 - protein, 115 aa, Corynebacterium glutamicum
MGELGDDASEAHAELGAELAKYNVQELVAVGENPNCAALAESAASLGVSTHVVSDVDAALELLAGHIKRDDVVLVKASNADRLWRVAEALHGMVPGLKNTGGSVNDDSRRNVEGQ

SEQ ID NO: 11 - DNA, 558 bp, Corynebacterium glutamicum
  CDS (101)..(535): FRXA02708
gagaatatcgcgcaggcaaaaggcgagatcattgaagcgctgccctcgaagaaaacggctcggtaccagtcctgaatactaggatccttttgtcgcccggatggctccacgcactaaggcgcgcgtggtgtggtttaccaccgatgcaggccaagcaaaaaagtctgattattgggcaacgagtatttcactggacgctgttgcgcgggcaagctttacgctgaacacgaaggacggctcttggccggtcaccctgcaggtttttggtgagcaccaggttgctaatgcacttgctgctgctgccattgccatggaagctggcgtcgccccagaattggtggttgctggattggaagcacattcagctgcttccgcgcaccgcatggatgtaaagacccgtgccgacggcgtgaccatcatcaacgattcttacaacgcgaatcctgattctatgcgtgcaggtatcgcggctcttgcgtacacagctagtggtcgttctgaagcaacaaagctgggcagtgcttggccaaatgggtgagcttggcgatgacgcctcgg

SEQ ID NO: 12 - protein, 145 aa, Corynebacterium glutamicum
MAPRTKARVVWFTTDAGQAKKSDYWATSISLDAVARASFTLNTKDGSWPVTLQVFGEHQVANALAAAAIAMEAGVAPELVVAGLEAHSAASAHRMDVKTRADGVTIINDSYNANPDSMRAGIAALAYTASGRSEATKLGSAWPNG

SEQ ID NO: 13 - DNA, 852 bp, Corynebacterium glutamicum
  CDS (101)..(829): FRXA02709
ttttgatgaccgcgaagaagttcgcgctgctttgacagaaaagctcaacaataaacttccccttactacggaagaaggataggccacagtcatgatcacaatgacccttggggaaatcgctgacatcgttggaggcaggcttactggcggtgctcaagaagatacgcttgtgagctccagcgtggagtttgattctcgatccctcacaccgggtggcttgtttttagcacttccgggtgctcgtgtagacggccatgattttgctgcaactgcaattgagaaaggtgcggttgcagtattggcagcccgtgaggttgacgtacctgcgatcgtcgtgcctccagtaaaaatccaggaatccaatgctgacatttatgctcatgatccagatgggcatggcgcggcggtagtggaggcgttgtctcggttggctcgccacgtggtggatatctgcgtggctggccatcaattgaacgttgtggctattactggttctgcgggaaagacttctacgaaggatttcatcgcgacggttcttgaccaagatgggccaactgtggctcctccgggctcgtttaacaatgagcttggtttgccacacaccgcgctccgctgcacaaccgatactaagtatttggtggctgagatgtccgcgcgtggcattggacatattaagcacctgacagagattgctccgccacggattgcagctgtgctcaacgtcggccatgcgcacctgggtgaatttggatcccgcgagaatatcgcgcaggcaaaaggcgagatcattgaagcgctgccctcgaagaaaacggctcggtaccagtcctgaatactaggatccttttgtcg

SEQ ID NO: 14 - protein, 243 aa, Corynebacterium glutamicum
MTLGEIADIVGGRLTGGAQEDTLVSSSVEFDSRSLTPGGLFLALPGARVDGHDFAATAIEKGAVAVLAAREVDVPAIVVPPVKIQESNADIYAHDPDGHGAAVVEALSRLARHVVDICVAGHQLNVVAITGSAGKTSTKDFIATVLDQDGPTVAPPGSFNNELGLPHTALRCTTDTKYLVAEMSARGIGHIKHLTEIAPPRIAAVLNVGHAHLGEFGSRENIAQAKGEIIEALPSKKTARYQS

SEQ ID NO: 15 - DNA, 1686 bp, Corynebacterium glutamicum
  CDS (101)..(1663): RXA02710
gaatttcataatctgaacttttgtttgaactcttttcggcatcacccacgtgccgcgtccgaattattaacacctagaaacctgtggaggagagaaaaccatggcaaccacgttgctggacctcaccaaacttatcgatggcatcctcaagggctctgcccagggcgttcccgctcacgcagtaggggaacaagcaatcgcggctattggtcttgactcctccagcttacctacctcggacgctatttttgctgcagttccaggaacccgcactcacggcgcacagtttgcaggtacggataacgctgcgaaagctgtggccattttgactgacgcagctggacttgaggtgctcaacgaagcaggagagacccgcccagtcatcgttgttgatgatgtccgcgcagtacttggcgcagcatcatcaagcatttatggcgatccttcaaaagatttcacgctcattggagtcactggaacctcaggtaaaaccaccaccagctacctcttggaaaaaggactcatggaggcaggccacaaagttggtttgatcggcaccacaggtacacgtattgacggggaagaagtacccacaaagctcaccactccagaagcgccgactctgcaggcattgtttgctcgaatgcgcgatcacggtgtcacccacgtggtgatggaagtatccagccatgcattgtcattgggcagagttgcgggttcccactttgatgtagctgcgtttaccaacctgtcgcaggatcaccttgatttccaccccaccatggatgattactttgacgcgaaggcattgttcttccgcgcagattctccacttgtggctgacaaacaggtcgtgtgcgtggatgattcttggggtcagcgcatggccagcgtggcagcggatgtgcaaacagtatccacccttgggcaagaagcagacttcagcgctacagacatcaatgtcagcgactctggcgcccagagttttaagatcaacgccccctcaaaccagtcctaccaggtcgagctagctcttccaggtgcgttcaacgttgctaacgccacgttggcatttgccgctgcggcacgcgtgggtgttgatggcgaagcgtttgctcgaggcatgtccaaggtcgcggttccaggccgtatggaacgcattgatgagggacaagacttccttgcagtggtggattatgcccacaagcctgctgcagtggctgctgtgttggatacgttgaggacccagattgacgggcgcctcggagtggttatcggtgctggtggagaccgcgattccaccaagcgtggccccatggggcagttgtccgcacagcgtgctgatctagttattgtcactgatgacaaccctcgttcagaggtgcctgccacgattcgcgcagcagtcactgcaggagcacagcagggtgcttcagagtccgaacgaccggtggaagtcctagaaattggtgaccgtgcagaagcaattcgcgttttggtcgagtgggcacagcctggagatggcattgtagtagctggaaaaggccatgaagttggacaactagttgctggtgtcacccaccattttgatgaccgcgaagaagttcgcgctgctttgacagaaaagctcaacaataaacttccccttactacggaagaaggataggccacagtcatgatcacaat

SEQ ID NO: 16 - protein, 521 aa, Corynebacterium glutamicum
MATTLLDLTKLIDGILKGSAQGVPAHAVGEQAIAAIGLDSSSLPTSDAIFAAVPGTRTHGAQFAGTDNAAKAVAILTDAAGLEVLNEAGETRPVIVVDDVRAVLGAASSSIYGDPSKDFTLIGVTGTSGKTTTSYLLEKGLMEAGHKVGLIGTTGTRIDGEEVPTKLTTPEAPTLQALFARMRDHGVTHVVMEVSSHALSLGRVAGSHFDVAAFTNLSQDHLDFHPTMDDYFDAKALFFRADSPLVADKQVVCVDDSWGQRMASVAADVQTVSTLGQEADFSATDINVSDSGAQSFKINAPSNQSYQVELALPGAFNVANATLAFAAAARVGVDGEAFARGMSKVAVPGRMERIDEGQDFLAVVDYAHKPAAVAAVLDTLRTQIDGRLGVVIGAGGDRDSTKRGPMGQLSAQRADLVIVTDDNPRSEVPATIRAAVTAGAQQGASESERPVEVLEIGDRAEAIRVLVEWAQPGDGIVVAGKGHEVGQLVAGVTHHFDDREEVRAALTEKLNNKLPLTTEEG

SEQ ID NO: 17 - DNA, 618 bp, Corynebacterium glutamicum
  CDS (101)..(595): RXN00531
gcctgcgggaatcggcactttcaggataggacaacctaatataaataagcttaggctaagggccggtgacaatttatcaagcagtgctataataggggtcatggcaaactacacagtccctggaatcaacgagaatgacgcaaagcagcttattgatggactgcaggagcgtctcaccgactacaacgatcttcacctcatcttgaagcacgtgcactggaacgtcactggccccaacttcattgctgttcacgaaatgctcgacccacaggttgaccttgttcgtggctatgctgacgaagttgcagagcgcattttcaccctcggaggcgcaccagttggaaccccagaaggccacgttgctgaccgcaccccactgcaatatgagcgcaatgccggaaatgtccaagcacacctcactgacctcaatcgcgtgtacacccaagtgctgaccggagttcgcgagtccatggcatcagccggcccagtggatccagtaactgaagacatctacatcagccaggccgcggagctggagaaattccagtggttcatccgcgcacacattgttgatgtagacggaaacatccaagagtaaaacgtcgaaaagcgttaagg

SEQ ID NO: 18 - protein, 165 aa, Corynebacterium glutamicum
MANYTVPGINENDAKQLIDGLQERLTDYNDLHLILKHVHWNVTGPNFIAVHEMLDPQVDLVRGYADEVAERIFTLGGAPVGTPEGHVADRTPLQYERNAGNVQAHLTDLNRVYTQVLTGVRESMASAGPVDPVTEDIYISQAAELEKFQWFIRAHIVDVDGNIQE

SEQ ID NO: 19 - DNA, 1095 bp, Corynebacterium glutamicum
  CDS (101)..(1072): RXA00944
aaatagtgggattaacccattaattttatcgctctatttagtttcgtcactgtgtcgttaatcaattgacttcctgcgtggttgaatcagcgcaaggattgtggatttttggactattctcgacaccatgacttccctccttactcccattgcaatccgtggattagaaattcccaataggatgtggctcgcgcccatgtgccagtaccaagccaataacctcgatggggttccacttgattggcacctcgtgcattacggagcccgagctgttggcggcttcggactcctcatcgcggaatccaccggcattagtccagagggaagaatctcatcgcgttgcactggcctatggaatgaggcccaagttgaggcatgggagagaattacaaattttgtccacgctcaaggtggactgatcggtgtgcaacttaaccatgcaggccgcaaagcgagcacatatccggcccttcctaacttccctactggtactcaatcagttgacgagggtggatgggaaacctttgggcctagtgctgtcgctcagccggggcttgcagatccgaccgaattgacccgcgaaggtattgaaaaggttattcaggatttcgctgctgctgcagagcgcgcggtgcgtgcagggtttgatgctgtggaggtccatggtgcccacggttacctgttgcatcagttcctcactcccctcgcaaataaacgtactgatatttatggaggttcgtttgagaatcgcacacgactatttagggaagtagcccaggcgatccgtgcagtgattccgggctcgatgccactgattgcccggatctctgccacggactggattgatgatgaaccttcgtgggatgacgatcaaaccgtctcgcttgtgtcaggatctgaaaaagctgggtgtggatgcagtcgatatttccaccggaggtgcagtacccgcgacaatccctgtggagccgagctatcaagtgaaatttgctcgtcgtgtgaagcaagaggtgggtatccctacctccgcggttggattaattactcatgtgggtcaggcgcaggggcatcttgatcgtggagatgcggacatta

SEQ ID NO: 20 - protein, 324 aa, Corynebacterium glutamicum
VDFWTILDTMTSLLTPIAIRGLEIPNRMWLAPMCQYQANNLDGVPLDWHLVHYGARAVGGFGLLIAESTGISPEGRISSRCTGLWNEAQVEAWERITNFVHAQGGLIGVQLNHAGRKASTYPALPNFPTGTQSVDEGGWETFGPSAVAQPGLADPTELTREGIEKVIQDFAAAAERAVRAGFDAVEVHGAHGYLLHQFLTPLANKRTDIYGGSFENRTRLFREVAQAIRAVIPGSMPLIARISATDWIDDEPSWDDDQTVSLVSGSEKAGCGCSRYFHRRCSTRDNPCGAELSSEICSSCEARGGYPYLRGWINYSCGSGAGAS

SEQ ID NO: 21 - DNA, 990 bp, Corynebacterium glutamicum
  CDS (101)..(967): RXS02560
ttggggcaagccagctaacgcatttcttgtggaaaccgcagacattgaggccgcccacgcggaacttctaagagcagtggaatgaaataatccggtgctgatgcagggcaactcgcttaatctggcagacaacagcgagagaaagaagcccatgccgtcaccaggagaacttttagccgcccgctacggacaacctgcaacctggacgccaccgcagtggaatgagacgcttgatgtcattcaccagcatcgatcagttcgcaggtggttggataaaccggttgatgatgacaccatccgcaccattatttccgccgcacaatcggctggaacctcttccaataagcaggtcatttctgtcatcgtggttaaagatcctgagctgaggaaaggcctcgcggggatcactcgccagatgtttccgcaccttgagcaggttcccgcggtgctgatttggttgattgattattcccgaatcagtgcggtggcagccagagaagatctcccaacaggggctcttgattatctcgatgaggccgcgtgggggttcctcgacgccggaatcgcagctcaaaacgctgcaattgctgcggagtcacttggattgggaacgctctatttgggttcggtgcgcaacgatgcggaagccgtgcacaaattgcttggccttccacctgagatcgtgcctgtcgtgggcttggaaatggggcatgcggatccgcctgaacctgccggaattaaacctcccctgccacaagaagccattgttcactgggatacctacaccgagaaaaacctcgaacttatcgattcctacgaccgcgccctcgacacttactattctcgctacggccagcaccagctctggtcgaagcagacggcgcatagggcggcgtcgaaaagcttttcaaaaaccaacaggcagttccttaggggcgtgtttgagcgcgccgggtttgggctgagataaaagcatgattatggacgcct

SEQ ID NO: 22 - protein, 289 aa, Corynebacterium glutamicum
MQGNSLNLADNSERKKPMPSPGELLAARYGQPATWTPPQWNETLDVIHQHRSVRRWLDKPVDDDTIRTIISAAQSAGTSSNKQVISVIVVKDPELRKGLAGITRQMFPHLEQVPAVLIWLIDYSRISAVAAREDLPTGALDYLDEAAWGFLDAGIAAQNAAIAAESLGLGTLYLGSVRNDAEAVHKLLGLPPEIVPVVGLEMGHADPPEPAGIKPPLPQEAIVHWDTYTEKNLELIDSYDRALDTYYSRYGQHQLWSKQTAHRAASKSFSKTNRQFLRGVFERAGFGLR

SEQ ID NO: 23 - DNA, 255 bp, Corynebacterium glutamicum
  CDS (101)..(232): RXS03119
tgggaggtgtcgcaccaagtacttttgcgaagcgccatctgacggattttcaaaagatgtatatgctcggtgcggaaacctacgaaaggattttttacccatggctgtatacgaactcccagaactcgactacgcatacgacgctctcgagccacacatcgtcgctgaaatcatggagcttgaccagtccaaggaccacgcaacctacgttgcgggcgcaaatgcagcactctaggcactagagaaggcacgcga

SEQ ID NO: 24 - protein, 44 aa, Corynebacterium glutamicum
MAVYELPELDYAYDALEPHIVAEIMELDQSKDHATYVAGANAAL

SEQ ID NO: 25 - DNA, 249 bp, Corynebacterium glutamicum
  CDS (101)..(226): RXS03120
ctgggcagttcttgggtacgaccacatatccggtcgcctggttatcgagcagctcaccgaccaggagggcaacatctccttcgacatcaccccagttctgatgctcgatatgtgggagcacgctttctacctgcagtacatgaacgttaaggcagattacgtcaaggctgtttggaacgtcttcaactgggacgacgcaagagcacgcttcgcagcagcttccaagtaagcatttttagtccgtgcaat

SEQ ID NO: 26 - protein, 42 aa, Corynebacterium glutamicum
MLDMWEHAFYLQYMNVKADYVKAVWNVFNWDDARARFAAASK

SEQ ID NO: 27 - DNA, 1311 bp, Corynebacterium glutamicum
  CDS (101)..(1288): RXA01430
gaaaaactagagaagcacctctagctggtattcttactgcagtcacgtggatgaactatatccattgataattttgaacatgaatgatggaaggagcagggtgtctaaagtcctgagagttggcgatcgcagcccgcgcgtggcagaagtgcgcactacgctcgctcgcctcggtgtgattgaaggctattccagggagatgtctgcaaagacagaatcccagaagttccacgaagaagagacgcttttcgacgaagaactcagcctcagcatcaagtcattccagcaagctcgaggagtcgttccctccgggcttattgacgaccccaccctgcgcgcaatccgcgaagcctcctacaccctgggaacccgcgtgctggcctaccagcccggcaaccagcttgttggtgacgacgttgtagaaatccaatcccatctccaagagctcggcttctacgccgaccgtgtggatggacattttggcgagctcacacacaaagctgtgatgaactaccaactcaactacggcatgcaggtagacggcatctgtggccctgacaccatccgtgcgctgtcccgacttggtctgcgcatcaagggtggctctgctcaagctatccgtgaacgcgaacgcatgcgcaatgcaggcccacgtcttgctggcaagcgtgtggtcattgatcctgcgcttgggggctccaacaagggtcagatcgtgaaaggcccctacggtgagatctctgaggaagaaatcctctgggatttggccacccgcctggaaggtcgcatgatcgcaacaggcatggaaaccattctgtcgcgcccgcacatggatgatcccagcagccgtgatcgcgcgtcgatcgcgaatgctttcggcgctgacctcatgctgagcctgcactgcgattcctacccgaatgaaaaagctaacggcgtggccagcttctacttcggttcggaaaacggcaccaactccttgaccggtgaaacgctctccgcgtacatccaaaaagagatcgttgcccgcaccccactgaacaactgtggcagccatgcccgtacctgggatctgctgcgcctcacgcgcatgcccatggtggaagttgtcaccggttacctcaccaaccccgatgacctggcagttctgactgatccacaaatgcgtgatcacattgccgaagccatcgttgtcgccgtcaagcgcctgtacctccttgatgaggaagcacagcccaagaccggaaccttcaagttctctgagctgttgcaatcagagcaggctggctaaatcgcgcccatctcttgaag

SEQ ID NO: 28 - protein, 396 aa, Corynebacterium glutamicum
VSKVLRVGDRSPRVAEVRTTLARLGVIEGYSREMSAKTESQKFHEEETLFDEELSLSIKSFQQARGVVPSGLIDDPTLRAIREASYTLGTRVLAYQPGNQLVGDDVVEIQSHLQELGFYADRVDGHFGELTHKAVMNYQLNYGMQVDGICGPDTIRALSRLGLRIKGGSAQAIRERERMRNAGPRLAGKRVVIDPALGGSNKGQIVKGPYGEISEEEILWDLATRLEGRMIATGMETILSRPHMDDPSSRDRASIANAFGADLMLSLHCDSYPNEKANGVASFYFGSENGTNSLTGETLSAYIQKEIVARTPLNNCGSHARTWDLLRLTRMPMVEVVTGYLTNPDDLAVLTDPQMRDHIAEAIVVAVKRLYLLDEEAQPKTGTFKFSELLQSEQAG

SEQ ID NO: 29 - DNA, 2199 bp, Corynebacterium glutamicum
  CDS (101)..(2176): RXA02641
aggcttctcagttgtttcatatagtctcagccgcaccaatatcatcagggagaacatcgtgcagcaacgacgccgcatcagcgagactcggaaaaaaccgatgctcgctattattttgaccgccgtattgggcgcatctggccttgcagccgctggcactcagtacctcaatactcagggcgaaggcatcggtccggtcgccgtccaaaacgacagtgaatcgtttaattccggcaccaacgtggttgttgaagacgcagcagtcaccgcccagggtgaaggcggaggcgctcgcaccgtcaaggaattccagcgtgaccagcaattctctagttttgctcttacctggaccggtaaaaaagacatcactgcttttgttcgcgcagaacaggaagacggcacctggtcacagtggtacgacttggagccaatggtcaatgaagatcaaggcaccaacggaactgagctgatctggcacggccctaccaacaagatccaggtttccaccctcaacgtggatctctttggagcagatgctgcagccgctgatgaaaacggtcaagacattccagcagtagatgcagccgaggcagcgccagcagcagaacctgcaccagctgaagcaccagtcgaggaagctcctgcacctgtcgcagaaccagcaccagctgctgaacctatcgctgagccagtcgctgattactcagcaaatgacggcctcgctcccctgccatccaactatggcgacatccagcctgttgccgatgttgatgacggcctaaacgcagtatttatcgatggcaacgctgatgcaggcgtgggtatcgctaacgttgctgacaccgatggcatgccaaaggtgatttctcgtgctggttggggtgcggacgaaagtctgcgctgctcaaacccaactattgatgatggcgtttctgcgatcaccattcaccacactgcgggttccaacaactacaccgaggcgcaggctgcagcccaggttcgtagtgcttacagctaccacgccaagaacctcggctggtgcgatatcggataccagtcattggttgataagtacggcaacatctacgaaggccgtgccggcggcatgaccaatgctgttcagggtgctcacgctggcggcttcaaccagaatacttgggcaatctccatgattggcgactattcctacaacgctccccctcaggaaaccatcaatgctgtcggtgagcttgctggttggcgtgcaaaggttgccggtttcgacccaactgggactgatactcactactcggagggtacttcttacgcgaagtactcctatggcacccgagtgtcacttcctaatatcttggctcaccgcaatgtcggcctgaccgcatgtcctggcgatgctggctatgcgcaaatggagaatatccgccagatcgttaaggcaaagtacaccagcttgcagaatggcaacacaggtggcacgactaccaccccggcgacaacgccgaaggagacgtcgacaagcaatgctccttcgacgaccactgcccagcttgtaactcccgctgaacctcagcagtacagcgaatccgatgccctggcagctctgctgacaggtggctcttccggcggcaccgacctgctcaatggcgcaaactctgagcagctcctgactggcctgggttccattgcggctgtgctgattgctgcgtctttggctgatggtggcctgaatggtctgatcagcaatgttggtagcaacaacggcgtcccagtgcttggcgatatcaagatcactgacgtcatcccaatcgttgataccgcgatcaacctaaccggagacaataagtactctcgcggttggaacgacctgaacaacacgcttggaccagtgcttggcgctgccactggtggcgaaaccaccgtgaagtacaccagcgaccagaactctgaggttactttcgtgccgtttgaaaatggcatcatggtgtcttcccctgaggctggaactcacggcctgtggggcgcaatcggtgacgcgtgggctcagcagggcgctgaccttggccctctgggacttccaaccagtaatgaatacaccgttggcgaacagcttcgtgttgatttccagaatggttacatcacttacgattctgcgactggccaggcaagcattcagctgaactagtctcaattagagccgaaaac

SEQ ID NO: 30 - protein, 692 aa, Corynebacterium glutamicum
MLAIILTAVLGASGLAAAGTQYLNTQGEGIGPVAVQNDSESFNSGTNVVVEDAAVTAQGEGGGARTVKEFQRDQQFSSFALTWTGKKDITAFVRAEQEDGTWSQWYDLEPMVNEDQGTNGTELIWHGPTNKIQVSTLNVDLFGADAAAADENGQDIPAVDAAEAAPAAEPAPAEAPVEEAPAPVAEPAPAAEPIAEPVADYSANDGLAPLPSNYGDIQPVADVDDGLNAVFIDGNADAGVGIANVADTDGMPKVISRAGWGADESLRCSNPTIDDGVSAITIHHTAGSNNYTEAQAAAQVRSAYSYHAKNLGWCDIGYQSLVDKYGNIYEGRAGGMTNAVQGAHAGGFNQNTWAISMIGDYSYNAPPQETINAVGELAGWRAKVAGFDPTGTDTHYSEGTSYAKYSYGTRVSLPNILAHRNVGLTACPGDAGYAQMENIRQIVKAKYTSLQNGNTGGTTTTPATTPKETSTSNAPSTTTAQLVTPAEPQQYSESDALAALLTGGSSGGTDLLNGANSEQLLTGLGSIAAVLIAASLADGGLNGLISNVGSNNGVPVLGDIKITDVIPIVDTAINLTGDNKYSRGWNDLNNTLGPVLGAATGGETTVKYTSDQNSEVTFVPFENGIMVSSPEAGTHGLWGAIGDAWAQQGADLGPLGLPTSNEYTVGEQLRVDFQNGYITYDSATGQASIQLN

SEQ ID NO: 31 - DNA, 1377 bp, Corynebacterium glutamicum
  CDS (101)..(1354): RXA00135
ccccggttcgcgtatagatcttggttaaatgaacggccataacttgagattctagctgtcgttacgcacaggggtggggaacacggataaggtggggcacgtgaaagacaagtttttagtcactggtggagcacagctgcagggcgctgtaaaagtttacggcgcaaaaaacagcgttttgaagctcatggcagcagcacttctcgctgaaggcacaacaactctaaccaattgccccgaaatcctcgacgtccccctgatgcgcgacgtcctcgttggtcttggctgcgatgtcaccatcgacggctcaaccgtaaccattactacccctgcagaactcagctccaatgctgacttcccagcagtcacccaattccgtgcatccgtatgtgtgcttggtccattgacagcacgttgtggtcgcgcagttgtatcccttcccggcggtgacgccattggatcccgtccactcgacatgcatcaaagcggcctggaaaagcttggtgccaccacccgcatttcccacggtgcagtagttgcagaagctgaaaagctcgtcggtgccaacatcaccctggatttcccgtccgtcggcgccaccgaaaacatcctcactgcatccgtcatggcagaaggacgcacagtattagataacgcagcgcgcgaaccagaaattgttgatctctgccgtatgcttcgatccatgggcgccaacattgaaggtgaaggaagcccacccatcaccatcgaaggcgtagagaaactcaccccaactcagcacgaagtaatcggcgaccgcatcgttgccggaacgtgggcatacgccgctgcgatgactcgtggcgatattacagttggcggaatcgcaccaaggtatctgcaccttccattggaaaagctcaagatcgccggcgccaaggtggaaacctacgaaaacggcttccgcgtccaaatggataagcagcctgaggcaaccgactaccaaaccctcccgttcccagggttccctacagatctgcaacccatggcaattggaatcaacgcagtatctaatggaacttcagtaattacagagaatgtctttgaatcacgattccgcttcgtcgatgaaatgcttcgcctgggcgctgacgcgaatgtcgatgggcaccacgtagtaatccgaggaattgaacagctttcctctacttccgtgtggtcttcagatatccgtgcaggagcaggactggttcttgccgccctttgcgcagacggagtgaccgaagttcacgatgttttccacatcgaccgcggataccccaacttcgtggaaaatctgcagaaactcggagcgaccatcgaaagggtttcttcctaacgaagccttcccatcaagca

SEQ ID NO: 32 - protein, 418 aa, Corynebacterium glutamicum
VKDKFLVTGGAQLQGAVKVYGAKNSVLKLMAAALLAEGTTTLTNCPEILDVPLMRDVLVGLGCDVTIDGSTVTITTPAELSSNADFPAVTQFRASVCVLGPLTARCGRAVVSLPGGDAIGSRPLDMHQSGLEKLGATTRISHGAVVAEAEKLVGANITLDFPSVGATENILTASVMAEGRTVLDNAAREPEIVDLCRMLRSMGANIEGEGSPPITIEGVEKLTPTQHEVIGDRIVAGTWAYAAAMTRGDITVGGIAPRYLHLPLEKLKIAGAKVETYENGFRVQMDKQPEATDYQTLPFPGFPTDLQPMAIGINAVSNGTSVITENVFESRFRFVDEMLRLGADANVDGHHVVIRGIEQLSSTSVWSSDIRAGAGLVLAALCADGVTEVHDVFHIDRGYPNFVENLQKLGATIERVSS

SEQ ID NO: 33 - DNA, 1221 bp, Corynebacterium glutamicum
  CDS (101)..(1198): RXA02706
ggtcgcagaagcactacatggcatggtgccgggcctcaaaaacacaggtggctcggtcaacgacgattctcgtcggaacgtggaaggacagtagaaaacaatgcaacagattatggtcagtggaacggttgcgttcctcgtctcaatctttctcaccccggtgttgatccgttatttcactaaccgccagttgggccaggaaatccgtgaagaaggcctgcagtctcacttgcgtaagcgtggcactccaaccatgggtggcattgcgattatcgcgggcattgttgtggcctatgtgtttaccaatatcttggccatgatccaaggcgttggtggattcacagtctccggcttgctcgtgttgggtctgaccttgggccttggtgccactggtttcgccgatgacttcatcaagctgtacatgaaccgaaaccttggtttgaacaagaccgctaagctggtgtctcagctggccattgcgttgatctttggttttttggtactgcagtttcccgatgaaaacggtctgaccccagcatcaacccacctgtcattcattcgcgatatcgacaccattgaccttggcttcgggggcagcgtttttggcatcatcgtgttcctcatctttatctacgttgtggtcagcgcgtggtcgaatgccgtgaacatcactgacggtttggatggtttggccgcaggtaccacagcatttgtcatgggtgcttacaccttgatcacgttctggcagttccgaaactcctgcgatactgcagtggaagcgggttgctatacggtgcgtgatccactggatttgtccgtgttgtgtgctgctggtctgggcgccaccttgggctttctgtggtggaatgcggcgccggcaaagatcttcatgggcgatactggttctttggcactgggcggtttggttgcaggtatttctgtggttagtcgcaccgagctgctcatggttatcatcggcgcgctgtttgtcattgagatcgcttctgttgcgatccagatcggcgtgtttaagacccgcggtaagcgtgtgttcaaaatggctccgatccaccaccacttcgaggcccttgggtgggctgaaactaccgtgaccatccgtttctggctgatcgcgatcatggctgtgttggcgggtgtcggtgtgttttacagcgactggctccacttagcggaggtataaataattatgggttctctgtc

SEQ ID NO: 34 - protein, 366 aa, Corynebacterium glutamicum
MQQIMVSGTVAFLVSIFLTPVLIRYFTNRQLGQEIREEGLQSHLRKRGTPTMGGIAIIAGIVVAYVFTNILAMIQGVGGFTVSGLLVLGLTLGLGATGFADDFIKLYMNRNLGLNKTAKLVSQLAIALIFGFLVLQFPDENGLTPASTHLSFIRDIDTIDLGFGGSVFGIIVFLIFIYVVVSAWSNAVNITDGLDGLAAGTTAFVMGAYTLITFWQFRNSCDTAVEAGCYTVRDPLDLSVLCAAGLGATLGFLWWNAAPAKIFMGDTGSLALGGLVAGISVVSRTELLMVIIGALFVIEIASVAIQIGVFKTRGKRVFKMAPIHHHFEALGWAETTVTIRFWLIAIMAVLAGVGVFYSDWLHLAEV

SEQ ID NO: 35 - DNA, 972 bp, Corynebacterium glutamicum
  CDS (101)..(949): RXA02411
gcagcgaatcgtctggtttcttgatcgggtgaatcagccattgccatattgtgacacatcttggacggataaaaagggaagcaacgcgaggtggcttatgatggcaaccgtgactgatttcagtggatctatgattgaacgccccgtgccaggtgctgatgcgccgattggaatttttgattctggagttggcggattaaccgtagctcgcacaatcatcgatcaattgccacatgaatcagttatttatatcggtgatactgccaatggcccttatggtccgttgcctatcgctaaggtccgtgagcacgccatccgcattgccgatgagttggtggaacgcggatgcaagatgattgtcattgcctgcaacactgcgtccgctgcgtttctccgagatgcccgtgaacgatacagtgtgccagtcgtggaagttattcttcccgcagtaaggcgtgcggtggcatccacccgcaatggcaaagtgggcgtgatcggcacagtgggaaccattaactccggtgcgtaccaggatcttttctctgcaagcccctccattgtggtcaacgcagtggcatgcccacggtttgtggatttcgtggaacgcggaattaccagcggcaggcagatcctcaacattgcgcaggattatttagagcctttgcaagcagaaggggtggacaccctcgtgcttggatgcacccactatccactgctttccggtgtcattcagttggcaatgggggaccacgtaagtttggtctctagcgcggaagaaactgcgaaagacgtgctgagaattttgagccagcaagatcttttagccgatccggacatgcatcctgagccaagttatagctttgaatcaacaggcgatccggaaatctttgcgcaattaagccgccgattccttggaccaattgtttcccaagtgagacaaaacgagggataaccccaggtgtgtgttctacc

SEQ ID NO: 36 - protein, 283 aa, Corynebacterium glutamicum
MATVTDFSGSMIERPVPGADAPIGIFDSGVGGLTVARTIIDQLPHESVIYIGDTANGPYGPLPIAKVREHAIRIADELVERGCKMIVIACNTASAAFLRDARERYSVPVVEVILPAVRRAVASTRNGKVGVIGTVGTINSGAYQDLFSASPSIVVNAVACPRFVDFVERGITSGRQILNIAQDYLEPLQAEGVDTLVLGCTHYPLLSGVIQLAMGDHVSLVSSAEETAKDVLRILSQQDLLADPDMHPEPSYSFESTGDPEIFAQLSRRFLGPIVSQVRQNEG

SEQ ID NO: 37 - DNA, 1203 bp, Corynebacterium glutamicum
  CDS (101)..(1180): RXN01022
cggtgtgtgccaccgagatatgaaagtaactgacatgattgtggctctcatgggcaggtctaagaaggctgagtagtcttaggttgtaagcttcaatgctgtgagcaactctaattctggaaaagtccgcgtcgcagtcgtttatggtggtcgcagttctgagcactccgtctcctgcgtctccgctggtgctatcatggcccatctcgatcctgagaagtacgatgtgattcccgtcggcattactgtcgacggcgcgtgggttgttggtgaaaccgatccacagaagctaactctcatcgatcgcaccatgcctgaggtggagcatcatgaagaggttcgcccaagcctggatcccgcacaccgtggagagttccacttttccgatggcagcttgtatgccaccgctgatgtgattttccctgtgctgcatggtcgttttggtgaagacggcactgtgcagggtctgtttgcactgtctgatattccggtcgttggcccaggtgtgctggcctctgctgcgggaatggacaaggaatacactaagaagctcatggcagcggaagggctgcccgttggccgtgaggtgattctacgtgatcgtaccgagctgaccgaggcagaaaagaacctgctgggcctgcctgtatttgtgaagcctgcgcgtggtggctcatcgattggtatctctcgtgttactgcgtgggaggattttaataaggctgtggggcttgctcgtgcccatgatgagaaggtcattgtggaatcagagatcgttggctctgaggtggagtgtggcgtgctgcagtatccagacggtcgtatcgtggcgtctgttcctgcgttgctgtctggcaccgaatcaggcgctggtggattctatgactttgataccaagtacttggacaacgttgttactgcagagatcccagcaccgcttgatgagaagaccacggaactgatccagtctttggctgtggaatctttccaggctcttgcgtgtgaaggccttgctcgcgtggacttctttgttaccgccaatggtcctgtgctcaatgagatcaacaccatgccaggatttacccccatttccatgtacccacagatgttcactgcatcaggcgtggcttatgaggaattgttggatgtgttggtgcagcaggcattgcaccgcgacaactagcatcaaataaaaacagcccc

SEQ ID NO: 38 - protein, 360 aa, Corynebacterium glutamicum
VSNSNSGKVRVAVVYGGRSSEHSVSCVSAGAIMAHLDPEKYDVIPVGITVDGAWVVGETDPQKLTLIDRTMPEVEHHEEVRPSLDPAHRGEFHFSDGSLYATADVIFPVLHGRFGEDGTVQGLFALSDIPVVGPGVLASAAGMDKEYTKKLMAAEGLPVGREVILRDRTELTEAEKNLLGLPVFVKPARGGSSIGISRVTAWEDFNKAVGLARAHDEKVIVESEIVGSEVECGVLQYPDGRIVASVPALLSGTESGAGGFYDFDTKYLDNVVTAEIPAPLDEKTTELIQSLAVESFQALACEGLARVDFFVTANGPVLNEINTMPGFTPISMYPQMFTASGVAYEELLDVLVQQALHRDN

SEQ ID NO: 39 - DNA, 827 bp, Corynebacterium glutamicum
  CDS (1)..(804): FRXA01022
cacttttccgatggcagcttgtatgccaccgctgatgtgattttccctgtgctgcatggtcgttttggtgaagacggcactgtgcagggtctgtttgcactgtctgatattccggtcgttggcccaggtgtgctggcctctgctgcgggaatggacaaggaatacactaagaagctcatggcagcggaagggctgcccgttggccgtgaggtgattctacgtgatcgtaccgagctgaccgaggcagaaaagaacctgctgggcctgcctgtatttgtgaagcctgcgcgtggtggctcatcgattggtatctctcgtgttactgcgtgggaggattttaataaggctgtggggcttgctcgtgcccatgatgagaaggtcattgtggaatcagagatcgttggctctgaggtggagtgtggcgtgctgcagtatccagacggtcgtatcgtggcgtctgttcctgcgttgctgtctggcaccgaatcaggcgctggtggattctatgactttgataccaagtacttggacaacgttgttactgcagagatcccagcaccgcttgatgagaagaccacggaactgatccagtctttggctgtggaatctttccaggctcttgcgtgtgaaggccttgctcgcgtggacttctttgttaccgccaatggtcctgtgctcaatgagatcaacaccatgccaggatttacccccatttccatgtacccacagatgttcactgcatcaggcgtggcttatgaggaattgttggatgtgttggtgcagcaggcattgcaccgcgacaactagcatcaaataaaaacagcccc

SEQ ID NO: 40 - protein, 268 aa, Corynebacterium glutamicum
HFSDGSLYATADVIFPVLHGRFGEDGTVQGLFALSDIPVVGPGVLASAAGMDKEYTKKLMAAEGLPVGREVILRDRTELTEAEKNLLGLPVFVKPARGGSSIGISRVTAWEDFNKAVGLARAHDEKVIVESEIVGSEVECGVLQYPDGRIVASVPALLSGTESGAGGFYDFDTKYLDNVVTAEIPAPLDEKTTELIQSLAVESFQALACEGLARVDFFVTANGPVLNEINTMPGFTPISMYPQMFTASGVAYEELLDVLVQQALHRDN

SEQ ID NO: 41 - DNA, 1212 bp, Corynebacterium glutamicum
  CDS (101)..(1189): RXA02703
caaagcaggcctaccgagcgccgttccgagagtcgcgcgatgattggcgtgacaaccgcaaccgcagataaatgtgaaatcaggagaactacgaataaagatggctaactccccaaaacccatgcgggttgtcgttgctggtggcggtaccgcaggacatattgagcctgcgttggcagtggctgaagcgctgcgcgataagcacggtgcaacagtttcggctttaggtactgctcgtggtttggaaacaaccctggtgcctgatcgtgggtttgagcttcatctcatcgagccggttccagtcccacgcaagcccaatatggatttgttgaagctcccattccgggtagctaaggcattaggccaagcacgcaaggcactgaaggacacagacgctcaagcggtcatcggctttggcggttatgtatctgctccggcttatatggcggcgaagtctttgggcttgccattttttgtccacgaagccaacgcccgtgcaggcatggccaacaaattgggcgtcaagctcggtggcgttggccttaatgctgttgctggttccggcatggacggcgacgtggtgggcattccgattcgtgctgttttaagtggcgcgcgggatgagtccgcagctgaccgagccagggacacttggggtttggacaaggaccgccaaaccatttttgtcaccggtggttcgcagggctctgtgagtatcaacaaggccgtcgagcaagctgtagatcagctggtggaggcaggtttccaggtgctccacgccgtgggtaagaaaaacgagttgcctgcagcgaaacccggctaccatcccgttccgtttatcgacgatatgcaggctgcctacaccgttgctgatcttatcgtgtgccgctccggcgcgatgacggttgcagaggtcaccgccgccggcgtccccgcgatttatgtcccgctgcctcacggcaacggtgagcaggctctcaacgcccaggctgtcattaaagctggtgccgcacgccagatcgacgacgcggacttcaccgcccagacgcttatcgacgccacccttgacattctccttcatccctccacacaccaatcgatgtcggacgcagctaaaacctccaccgcaggtaacgcctccacggtgattgcagacatgattgctgcaactatcaatagccaacacaactaaaacgaccagctcaacgcaaa

SEQ ID NO: 42 - protein, 363 aa, Corynebacterium glutamicum
MANSPKPMRVVVAGGGTAGHIEPALAVAEALRDKHGATVSALGTARGLETTLVPDRGFELHLIEPVPVPRKPNMDLLKLPFRVAKALGQARKALKDTDAQAVIGFGGYVSAPAYMAAKSLGLPFFVHEANARAGMANKLGVKLGGVGLNAVAGSGMDGDVVGIPIRAVLSGARDESAADRARDTWGLDKDRQTIFVTGGSQGSVSINKAVEQAVDQLVEAGFQVLHAVGKKNELPAAKPGYHPVPFIDDMQAAYTVADLIVCRSGAMTVAEVTAAGVPAIYVPLPHGNGEQALNAQAVIKAGAARQIDDADFTAQTLIDATLDILLHPSTHQSMSDAAKTSTAGNASTVIADMIAATINSQHN

SEQ ID NO: 43 - DNA, 2235 bp, Corynebacterium glutamicum
  CDS (101)..(2212): RXA02711
aaaacctccaggcgattccacaagaagcagcagctccgccgtatcagaccaacactgttccttatgctgcaaccaccggacaagcaggtggcgcagggcagtgactttccccagcaatggcagaagtcggggcgagcgtgcgggacgtgaagatacgtcccgccgttcggcgtatcaggacgaaagcagaagagccgctagagagcgcgaacttacgcgacgcagcggtaaagctaaaggcgtaaaccaagaagaaggagtgacctaccggcctaaatcttcaacccagggcggcgcacgcaagcgacgtgtgaacatggttaccgctatcgcattggtcatcgctggcgtactgatcattcgcctcggctgggtccaagttgtctggggaccagaactgtccctcaatgcttcggaacagcgcacccgcgtgtacgtagatcctgcacgtcgtggaagcatcgtggaccgcgaaggaaaccagatggcgtacacgatgcaggcacgttcgctgacggtttctccgaacatcatgcgtgaggaattaaagaccggaactgatttggccttgcgtttggcggctgaagaaaccgatccggaaaacgtggccagctatgtgaccatcgaagaaggcaacgcgtatgtttttgcgtctgaagaacagcgcgaaaccattctgtccgacaaggtagaagagcgcattcaaagcattgcggatcggatccctgagatcatcaaatcccatgaccaagatgtcactggaatttcctctgaggagatcctggacaagctcaatgctgatagccagtatgaggtgctcgtccgcaatgttgatcccgatgtagcgtcagaaatcaccgatgagatgcccagcgtcgcagctgatcatcaagacatccgccaatacccaaacggcgcgattggtgaaaacatcatcggtcgaatcagcatggacggcgaaggccagttcggctttgaggcttccaacgattccctgttggcaggaaacaacggtcgctcaacccaggacatgtccattttgggacaagcaataccgggcacgttgagggatcaaattccagccattgatggtgccagcgttgaactcaccgttgatctggatctgcaaacctatgtgcagcaggcattggagcaggcgaaagctaactccggtgcagaaaacgcctccgctgtggttcttgatgccaagaccgctgaggttttggcgatggcaaacaccgataccatcaaccccaacgaagacacgggaaagcagattgagcagggcaagagctttgacaatccttctgtcacccaccccttcgagcctggttctgtagccaaggtgattactgcagcaggcgtaattcaagagggcttgactactccagatgaagtgttgcaggtaccgggcagtattgaaatggccggtgtttctgtcggtgatgcgtgggaccacggtgtcgttccctacaccactgcaggaatttttggtaagtcctcgaatgtaggcactctgatgcttgcgcagcgtcttggtgaagataaatttgctgattacctggaacgattcggtgtgggacagccaacgggtattgagcttccgagcgaatcccaaggcctgctgcccgcacgtgagcagtggtctggcggtacttttgctaacctgcccatcggtcagggtatgtcgatcaccacgttgcaaatggctggaatctaccaagccttggccaacgatggtgaacgcattcaaccgcggatcatcaagagcgtgactgattctgacggaacagtcctagagcagccagaacccgataaaatccaggttgtcagcgctgaagctgcccgcaccacggtggatatgtttaggtctgtcacccaggttgatccaactggagtgcaacaaggtaccgctccagacgcctccattgagggttatcaaatctcaggtaagacaggtacggcgcagaaagttgaccccaacacgggcgcgtactctaactcgcaatactggattaccttcgcgggtattgcacccgctgatgatcctcgatttgttgtagccatcatgcttgatgagccagaacgcggagtccacggtggtggcggccaaaccgcagcacctttgttcaaagacatcgccacctggttgctcaaccgcgacaacatcccactgtctgcagccaccgaaccgatcatccttcaagctcaataactcaaacagaagtgtctttt

SEQ ID NO: 44 - protein, 704 aa, Corynebacterium glutamicum
VTFPSNGRSRGERAGREDTSRRSAYQDESRRAARERELTRRSGKAKGVNQEEGVTYRPKSSTQGGARKRRVNMVTAIALVIAGVLIIRLGWVQVVWGPELSLNASEQRTRVYVDPARRGSIVDREGNQMAYTMQARSLTVSPNIMREELKTGTDLALRLAAEETDPENVASYVTIEEGNAYVFASEEQRETILSDKVEERIQSIADRIPEIIKSHDQDVTGISSEEILDKLNADSQYEVLVRNVDPDVASEITDEMPSVAADHQDIRQYPNGAIGENIIGRISMDGEGQFGFEASNDSLLAGNNGRSTQDMSILGQAIPGTLRDQIPAIDGASVELTVDLDLQTYVQQALEQAKANSGAENASAVVLDAKTAEVLAMANTDTINPNEDTGKQIEQGKSFDNPSVTHPFEPGSVAKVITAAGVIQEGLTTPDEVLQVPGSIEMAGVSVGDAWDHGVVPYTTAGIFGKSSNVGTLMLAQRLGEDKFADYLERFGVGQPTGIELPSESQGLLPAREQWSGGTFANLPIGQGMSITTLQMAGIYQALANDGERIQPRIIKSVTDSDGTVLEQPEPDKIQVVSAEAARTTVDMFRSVTQVDPTGVQQGTAPDASIEGYQISGKTGTAQKVDPNTGAYSNSQYWITFAGIAPADDPRFVVAIMLDEPERGVHGGGGQTAAPLFKDIATWLLNRDNIPLSAATEPIILQAQ

SEQ ID NO: 45 - DNA, 749 bp, Corynebacterium glutamicum
  CDS (1)..(726): RXA02859
cagtataccgttgatcagctgctgcacggtcttcttttagccagcggtaacgatgcggcgtatctgttggctcaggaacttggtggggatcaagcaaccctggagaaagtaaacgcgctggccaaggagttgggcactcaagacaccttcgttgccacttattccggtttggatgcgccgggaatgtcgacctccgcatacgacatgtcattgatttatcagcatgcgtggcagaacccggttttcgagtcgattatctccaccgatcacattgatttccctggttggggcgacaatgagggtttccaagtctggaacgataacgccttgttcatgaacgatcctgatggcatcggcggcaagaccggctacaccgacgacgcgaaccacacctttgtcggcggtctcgatcggggtggtcgccgcctcgccgccgtactcttggattccaccgtcagcgacattcgtccgtgggaacaagcacgattgcttatcgacgcctccctccccatcacgccggggtccggcgtgggccagctgggctccggcagcgcgaacgatgtggcaccggcgaccccagaattaccagaacccaccgacaacctgacttcaggtgagggtgggtcgcagaacacgctgcttaagctcgtggtgcccatcggaatcatcgtgctgttgctaatcgccgcactagcgtggacattcagatctcccaagaaaaagaactaggtgttcttcttcacgacctc

SEQ ID NO: 46 - protein, 242 aa, Corynebacterium glutamicum
QYTVDQLLHGLLLASGNDAAYLLAQELGGDQATLEKVNALAKELGTQDTFVATYSGLDAPGMSTSAYDMSLIYQHAWQNPVFESIISTDHIDFPGWGDNEGFQVWNDNALFMNDPDGIGGKTGYTDDANHTFVGGLDRGGRRLAAVLLDSTVSDIRPWEQARLLIDASLPITPGSGVGQLGSGSANDVAPATPELPEPTDNLTSGEGGSQNTLLKLVVPIGIIVLLLIAALAWTFRSPKKKN

SEQ ID NO: 47 - DNA, 1149 bp, Corynebacterium glutamicum
  CDS (101)..(1126): RXA00569
ctgccggctgggtaagaaaaggtcgtggcggcgtttatgaagtccccactgagcggatcatcccgctactaaccatcatttctgccagtgagaatcactaatgagattaaagaagcagcttcttggcagcctgttagttgtcatcgtggttttgtccatcgccgtagcaaccaccaaacaacaaaaaggcttcgtcacaggtcagcccaccggtgcgcttaacctctccgacatcctcgactccgaagaacttggcgagtatcacctcatgtcagccgccatcatcactggtaacactgtagatttcagcgggctcggcgcaggtccagacgacccttttgaaatcgcatcgattacgaagatcttcaccggtgagctgcttcgacttcagattgagcgaggagagatcacagaatccacggccgtcggagacgttcttggagaacgtgtagccgactccctcatccgggacataaccgtggaagaactagccaatcacaccagcggactaccccgtctaggcaatgtaggacttagaccttttatggctacgttctttgacaagaatccttacaaagacctctctgcagatcgagtcatctctatcagcacaacgtccaaattgaattcgcgcggagaatttcactactcaaatcttggttttgctctgcttggccaagtccttgcccgcaatgccggtttaacgtttgaccagctcttagaccgtgatttactggcaccactcaacctcaataacaccaagctcatgaccccagaatccctcgctcaagatgcacctcaagggttctcaacacctggcaaacaagtcgaagcgtgggagatggatggctttctccccgcagctggcctgcgttccaccgcgcgcgacatggcagttttctgtcagtacttattcacaaaaggccccgcccctttcacctggcaatcccttgaatcggcccctgaaatcgtctggcataacggagagtcctttggatatagttccgtactcttctttaacaccgctacaactactgccatcttcgttgctgccgacgttgccacatctgtcttcccaattggtcacgagcttttaatggcaaactccactaggcaggaatcaaaatgatcgattcccccgcctctatc

SEQ ID NO: 48 - protein, 342 aa, Corynebacterium glutamicum
MRLKKQLLGSLLVVIVVLSIAVATTKQQKGFVTGQPTGALNLSDILDSEELGEYHLMSAAIITGNTVDFSGLGAGPDDPFEIASITKIFTGELLRLQIERGEITESTAVGDVLGERVADSLIRDITVEELANHTSGLPRLGNVGLRPFMATFFDKNPYKDLSADRVISISTTSKLNSRGEFHYSNLGFALLGQVLARNAGLTFDQLLDRDLLAPLNLNNTKLMTPESLAQDAPQGFSTPGKQVEAWEMDGFLPAAGLRSTARDMAVFCQYLFTKGPAPFTWQSLESAPEIVWHNGESFGYSSVLFFNTATTTAIFVAADVATSVFPIGHELLMANSTRQESK

SEQ ID NO: 49 - DNA, 1008 bp, Corynebacterium glutamicum
  CDS (101)..(985): RXN03092
ccgactgtcagcagtaacgcacagtcgaataaataaagattggctgacattgttggagtcttgggttcacgattcccggggttatcgctaggctgttggagtgtccaccacgaattctctgacaaagctcgttgcatctacagtcgccgctggcgtccttggtgcgctcgcacttgtgcctttcgctagtctttctggcgttgcggttgcgcgtaccaatgacacgatgcagaccaacctttcagatctgacggatggtcgcgggccgggcgtcacgacgattactgattccactgaccagccgattgcttatatttatgcgcagcggcggtttgaggttgggggtgatcagatttctacgtcgatgaaggatgcgatcgtttcgattgaggatcgcaggttctatgagcatgatggtgtggatttgcagggctttggtcgtgcaatcctgacgaacctggctgcgggtggcgtggagcagggtgcttcgacgattaaccagcagtatgtgaagaacttcttgctgttggtggaagctgatgatgaggcggagcaggctgctgctgtggaaacctccatccctcgtaagctccgtgagatgaagatggcgtctgatttggaaaagacgttgtcgaaggatgagattctgactcgttatctcaacattgttccttttggtaatggtgcttatggtgttgaggctgcggcgcggacgtatttcggtacgtcggctgccgagttaaccattccacagtctgcgatgctcgcgggcattgtgcagtcttcgtcttatctcaatccatacaccaatcacgatgctgtgtttgagcgtcgtaatactgttttgggcgctatggctgatgctggcgcgatttccccagacgaggcttcggctttccagcaggaacctttgggtgtcctggaaaccccgcaaggcttatccaatggttgtatcggcgctggcgatcggtggttttttttgcaataacgctcttgcaatatctttct

SEQ ID NO: 50 - protein, 295 aa, Corynebacterium glutamicum
VSTTNSLTKLVASTVAAGVLGALALVPFASLSGVAVARTNDTMQTNLSDLTDGRGPGVTTITDSTDQPIAYIYAQRRFEVGGDQISTSMKDAIVSIEDRRFYEHDGVDLQGFGRAILTNLAAGGVEQGASTINQQYVKNFLLLVEADDEAEQAAAVETSIPRKLREMKMASDLEKTLSKDEILTRYLNIVPFGNGAYGVEAAARTYFGTSAAELTIPQSAMLAGIVQSSSYLNPYTNHDAVFERRNTVLGAMADAGAISPDEASAFQQEPLGVLETPQGLSNGCIGAGDRWFFLQ

SEQ ID NO: 51 - DNA, 1033 bp, Corynebacterium glutamicum
  CDS (101)..(1033): FRXA00594
ccgactgtcagcagtaacgcacagtcgaataaataaagattggctgacattgttggagtcttgggttcacgattcccggggttatcgctaggctgttggagtgtccaccacgaattctctgacaaagctcgttgcatctacagtcgccgctggcgtccttggtgcgctcgcacttgtgcctttcgctagtctttctggcgttgcggttgcgcgtaccaatgacacgatgcagaccaacctttcagatctgacggatggtcgcgggccgggcgtcacgacgattactgattccactgaccagccgattgcttatatttatgcgcagcggcggtttgaggttgggggtgatcagatttctacgtcgatgaaggatgcgatcgtttcgattgaggatcgcaggttctatgagcatgatggtgtggatttgcagggctttggtcgtgcaatcctgacgaacctggctgcgggtggcgtggagcagggtgcttcgacgattaaccagcagtatgtgaagaacttcttgctgttggtggaagctgatgatgaggcggagcaggctgctgctgtggaaacctccatccctcgtaagctccgtgagatgaagatggcgtctgatttggaaaagacgttgtcgaaggatgagattctgactcgttatctcaacattgttccttttggtaatggtgcttatggtgttgaggctgcggcgcggacgtatttcggtacgtcggctgccgagttaaccattccacagtctgcgatgctcgcgggcattgtgcagtcttcgtcttatctcaatccatacaccaatcacgatgctgtgtttgagcgtcgtaatactgttttgggcgctatggctgatgctggcgcgatttccccagacgaggcttcggctttccagcaggaacctttgggtgtcctggaaaccccgcaaggcttatccaatggttgtatcggcgctggcgatcgtggtttcttctgcgattacgctctgcaatatctttctgagcagggaatcacccaagatatgctg

SEQ ID NO: 52 - protein, 311 aa, Corynebacterium glutamicum
VSTTNSLTKLVASTVAAGVLGALALVPFASLSGVAVARTNDTMQTNLSDLTDGRGPGVTTITDSTDQPIAYIYAQRRFEVGGDQISTSMKDAIVSIEDRRFYEHDGVDLQGFGRAILTNLAAGGVEQGASTINQQYVKNFLLLVEADDEAEQAAAVETSIPRKLREMKMASDLEKTLSKDEILTRYLNIVPFGNGAYGVEAAARTYFGTSAAELTIPQSAMLAGIVQSSSYLNPYTNHDAVFERRNTVLGAMADAGAISPDEASAFQQEPLGVLETPQGLSNGCIGAGDRGFFCDYALQYLSEQGITQDML

SEQ ID NO: 53 - DNA, 1545 bp, Corynebacterium glutamicum
  CDS (101)..(1522): RXA01828
catccctgatggctaactacattctgatggccatcatcttgcgtatttctgacagtgcccgccgacctgtcatgtccaagcaagcatcggaggtggctgcgtgaaccgctcgattcgaatcacatccctcttctctttgctcctgatcttggtgctcgtagcaaacctcacctggattcaggcttttagggacgatgatcttgctcagaacccactgaacgcacgtggtttcctggaggcgaagtccactccgcgtggacagatttcaactggtggccaagtactcgcagagtcctcccaggacgatcagggtttttaccagcgcagctacatcaccaacccgactgcctacgcaccggtggttggttacctctctgatgtttatggagcagctggcctggaattgggatacaactctatcctcaacggcagtgactcttccctgtttacctcccagtggctggatgtcatttctggcagccctacccatggcgcaaacattgagctgaccttggatcccaatgcgcagcaaactgcttatgaacagctgagccaaagcggctacgagggtgctgtggtggcgcttcgcccaagcactggtgaggtgctggccatggcgtcatcgccaagctatgaccccaaccagatcgtggatccagcaaccgcagaggacgcttgggctgagtacacctccactgaaggtgcaccgctgctcaaccatgcaacgcaggaatcactgcctcctggatctattttcaagatcatcactactgcggcagctttggaaaacggctactctgctgattccaccgtgactgcagaggcagcagtgaccctgcctggcaccaacaccaccttgaccaactacggcggtcagacatgtgcgggcggtggcaccactaccctgctcaccgctttccagctctcctgcaatactgcgtttgtggagaccggcattgatgttggcgcggatgctttgcgcgcgtctgccgaggacttcggagtgggacaaacctacagcttgggactagataacgttcctggcggcttgggtgaaatccccgacgatgccgcccttggacaatccagcattggccagcgcgacgtgcaaatgaacgtgctgcaggccgctgtcatggcaggaaccgtatccaacggtggcgtacgcatggaaccatatttggtatcccgcgtcaccggtcaggacctgagcgaactgagcacccacaagccgaaatcagttggtggagtcgagccagaaattgcagaacagttgaagactttgatggaagcctcagagcgcaatacttcgggctacaccggaattcagatcgcttccaagactggtaccgcggaacatggtgatgaaaacacaccaccacacacctggtacgtggcattcaacaacgacattgctgttgctgtgttggtgaaagacggcggtggatttggcaccagtgcaactggtggtcaggtcgcagccccaattggccgagctgtgcttcaggcagccggaggattttaaaatatgagtcaagaagacat

SEQ ID NO: 54 - protein, 474 aa, Corynebacterium glutamicum
VNRSIRITSLFSLLLILVLVANLTWIQAFRDDDLAQNPLNARGFLEAKSTPRGQISTGGQVLAESSQDDQGFYQRSYITNPTAYAPVVGYLSDVYGAAGLELGYNSILNGSDSSLFTSQWLDVISGSPTHGANIELTLDPNAQQTAYEQLSQSGYEGAVVALRPSTGEVLAMASSPSYDPNQIVDPATAEDAWAEYTSTEGAPLLNHATQESLPPGSIFKIITTAAALENGYSADSTVTAEAAVTLPGTNTTLTNYGGQTCAGGGTTTLLTAFQLSCNTAFVETGIDVGADALRASAEDFGVGQTYSLGLDNVPGGLGEIPDDAALGQSSIGQRDVQMNVLQAAVMAGTVSNGGVRMEPYLVSRVTGQDLSELSTHKPKSVGGVEPEIAEQLKTLMEASERNTSGYTGIQIASKTGTAEHGDENTPPHTWYVAFNNDIAVAVLVKDGGGFGTSATGGQVAAPIGRAVLQAAGGF

SEQ ID NO: 55 - DNA, 1208 bp, Corynebacterium glutamicum
  CDS (1)..(1185): RXA00612
gccgctgcagccattcagcagggcgctggcctagacaccatgttggatgttccttctcgatatgaggtcaagggcatgggctccggcggtgccgcgaactgtcccgcaaatacttactgcgtggaaaacgcaggatcctacgcgcctcgcatgactctgcaggacgctctcgcgcagtcccccaacactgcattcgttgaaatgatcgagcaggttggcgtggacaccgttgtggatctttcagtaaagctgggcctgcgaagctacaccgatgaaggttccttcgacggcgaaagctcaatcgcggactacatgaaggacaacaacctcggttcttacactcttggacctaccgctgttaaccctcttgaattgtccaatgttgctgcaaccattgcatccggtggcatgtggtgcgaacccaatcccatcgccagcgtccatgaccgtgaaggcaacgaagtctacattgaccgccctgcatgtgagcgcgccatcgatgccgaaacggcttcagctttggccgtcggcatgagcaaggatacggtcagcggaactgcggcctctgcagccagcatgtacggatggtccttgccaaccgcagcgaagaccggtaccaccgagtccaaccagtcctcagcatttatgggcttcaacagcaactttgccgcagctccatacatctacaatgacggcacctccaccaccccactgtgcagcggccccgtccgccagtgcagcagcggtaacctcttcggcggtaacgaaccagctcaaacatggtttaacatggcaagcaacgtccccgcagcttcgcaaggaacactgccatccagcagcgattcattccgcctcggcacttccggcgaactcctcaaccaggttgtcggccaaagcgaagcctccgctcgacgcaccctcgaagccaaaggctacaaggtcaccacgcgttcagtctccggcgccggcagcgcgcgcggcaccgtagtcagcgcaacccctcagggtgcagtgcttatcgacggtggaaccgtcattttggacatctccgacggcacaagccctgcccccgctgccaccaacaatgatgacagcgacgatggagacacccctgctccatcaacaaacaaccgcggaacaaccattgaagacgccatcaatgacgccatcaaccagttcttccgctagaaatacctagttgctcaaac

SEQ ID NO: 56 - protein, 395 aa, Corynebacterium glutamicum
AAAAIQQGAGLDTMLDVPSRYEVKGMGSGGAANCPANTYCVENAGSYAPRMTLQDALAQSPNTAFVEMIEQVGVDTVVDLSVKLGLRSYTDEGSFDGESSIADYMKDNNLGSYTLGPTAVNPLELSNVAATIASGGMWCEPNPIASVHDREGNEVYIDRPACERAIDAETASALAVGMSKDTVSGTAASAASMYGWSLPTAAKTGTTESNQSSAFMGFNSNFAAAPYIYNDGTSTTPLCSGPVRQCSSGNLFGGNEPAQTWFNMASNVPAASQGTLPSSSDSFRLGTSGELLNQVVGQSEASARRTLEAKGYKVTTRSVSGAGSARGTVVSATPQGAVLIDGGTVILDISDGTSPAPAATNNDDSDDGDTPAPSTNNRGTTIEDAINDAINQFFR

SEQ ID NO: 57 - DNA, 1404 bp, Corynebacterium glutamicum
  CDS (101)..(1381): RXA01510
ccgcgcgtatggttcgtgcgtgagacgacggtcgatataaggttggagtcctgatatcgcaagaagaatcgcaagaaaatttgcaggagaaggagcgcccatgaaaaatgcgtggtgggttggctcatcggttggtgtactgattgcagtgggggctgtcatcggtggtggcgtgtgggtgaatcattctggttttggtttggatcacccggagcccatgtcggtggagatgcctgagcagctgttttcttctgcgattgatccggatgctttggaagccccagattttgccactttggagaaggatttgacctcgcaggctgcggattctcggttgggcacttttgtcggtgttgccagggatgtggaatctggtgaggtggtgtgggagcagaatcaggggactgcggtgaggccggcgtcggcgacgaagattttgacggcggcggtggcgttgtatgagcttggccgtgaggacaccatcacaacgaaggttgttgagggggagcagccgggaacggtggtgattaaggcgggtggtgatgtcacgttgagtgaggagatgctcgatgatttggccacccagcttgaggggcaagatattggcactgtgttgatcgatacgtctatttggcctgatgagggctttgctagtacgtgggatccagtggatgttgatgctggttatatcgctgatgtggagcccgcgatgattgaggctgcccgcattggtgggtcggagggggatctgccgaggtctcatactccggcgttagatgttgcgcaggcgttggcggatcgtgtcggcgcggacaccgtagatgagggcagcgctccggacaaaaccgtgctggcatccgtggagtctgacacgttggatcagcgtcttgctcggatgatgaaggattctgacaatgtgatggcagagggtatcgctaaggaagtggccgcgtcgaaggatttggctaccgattcggcgagtacctcgaagatgacgttggagattctcaaggacaagggcttcgatttgagtggcgtgtccattgtggataattcgggtttgagctttgacaacctcattacgccccgcctgcttgatgatattttgacccgcgccgccacggaacctgagttgagttcactattgacatcgctgcctatcgcgcatggaaccggaaccttggaggatcgctacgacggactctcaggtgcgggttgggtgcgggcgaaaactggcactctgacggatacatcggcattggcaggggtggtgacctcggagtcggggcgtgtgtttacctttgcttttgtgtctaatggttccgcgattgtgccggcgcgtgaggctttggatgagatggcgtcgattctgagggacttttaaggtggcatccctcatcggga

SEQ ID NO: 58 - protein, 427 aa, Corynebacterium glutamicum
MKNAWWVGSSVGVLIAVGAVIGGGVWVNHSGFGLDHPEPMSVEMPEQLFSSAIDPDALEAPDFATLEKDLTSQAADSRLGTFVGVARDVESGEVVWEQNQGTAVRPASATKILTAAVALYELGREDTITTKVVEGEQPGTVVIKAGGDVTLSEEMLDDLATQLEGQDIGTVLIDTSIWPDEGFASTWDPVDVDAGYIADVEPAMIEAARIGGSEGDLPRSHTPALDVAQALADRVGADTVDEGSAPDKTVLASVESDTLDQRLARMMKDSDNVMAEGIAKEVAASKDLATDSASTSKMTLEILKDKGFDLSGVSIVDNSGLSFDNLITPRLLDDILTRAATEPELSSLLTSLPIAHGTGTLEDRYDGLSGAGWVRAKTGTLTDTSALAGVVTSESGRVFTFAFVSNGSAIVPAREALDEMASILRDF

SEQ ID NO: 59 - DNA, 1962 bp, Corynebacterium glutamicum
  CDS (101)..(1939): RXN01608
acagcgcggaattatctagacgcacacgtgttggtaaccgatcacaccagcgcacgctgctaatcttcactccatgaacaaggtgcagcgcaggtcactgatggcgttgtgcatgacggtggcatttgctggaggaagcctgaccgcgtgcacacctcgtcctgataccgcagaccccatcgcagaggaattccttcaagcttgggcatcgcaagatttcgacactattgcggacatcaccgaccaagctgaccttgccacagaaatgctcagcaccagtttcgatggtctgcaagcagacagcgttgaactgactttggattccgtggattcccgggacaccatcgccaccgccaatttctccgtggtgtggaagcttccccgagacagagaagtttcctacgactcatcgatgacgctgaccaagatgcgcaacgaatggacagtgcgttgggaaccttccctcgtgcaccccaaactgggcgccaaccagcacctggaattgcgcgccattgaagcgcagcgagccaacgtaatttcctccgatggagctccggttctcgcgccgggaagtatctaccgagttttggttgatcccagcgcaggggatgccgatgtggtggtcaagagggtggcagattatttgaatgaagcccatgcgactgatgagaatgtgaacacccttgatgtcgaagacattatgagcaatcttggcgattccacctattcactcaccacagttgatgccaatttgggtgcccgcatggaacaggatctagcggggattccggggctgacgttcaatgaggaagcatccatggtagccaccgacccaggttttgctccggatattgtgtctcgcgttgcgcgcattgtggaagatgaattagaaggatccaatggttggcgcgcctccattgtcacttccaatggtgcggtgattgatgatatcgcctacgacgccccagagcttgcccccagcgtgaggatcagcctggatcacaacgttcaacgagcagcggaagaagccgtagacctgcgcgctgagatgaaagccatgatggtggtcatgaggccatccactggtgaaatcctcgcagtggcccaaacagatgaagctgacaaagacggcgatgttgcgctgatgggacaatacccaccgggatcgacattcaagatcatcactgcagccgcggggttggcgcatgaaggattaactccagacagcattgtgccatgccctggcaccatgaatatctacggccgaattgtcaccaactacaacagcttctccttgggcaacacctcattggatgatgcttttgccaattcatgcaacaccactttcgcggatattttccaccacttggagccaggccaactgaaaaatgtggctaagcagtttggcctcggaattgattatcaaatcccaggccttgacaccatgacgggatcggtgcctgaaggtgacatcgtgttggaccgtaccgaatctggttacggccagggtcttgacctagcaagtccctttggcatggcgttggtcgcctccactgcagccaccggttcagttcccacgccaacgctgatttctggacatgaaactgttgccagtgaagaagttctggcgcttgatccagaagtccttgccaatgtgcagcggatgatgaaatccgtggtcaatgacggtaccgctcgtggcatgcgccaaaccggtggccagatctacgcaaagacaggtgaagccgaaatcaacgaaggctcccatgcgtggttcaccggctaccgcgaagatgacatcgcttttgccaccctcgtggtgttgggcggaggctccgaagcggctgccgctgtgacagatcagttctttgtgaaactcgatgagcttcgcgcagggggagaagttgcagtcagtgaagctgaagagcagccagtcggctaaaaaatagcctccatccaacc

SEQ ID NO: 60 - protein, 613 aa, Corynebacterium glutamicum
MALCMTVAFAGGSLTACTPRPDTADPIAEEFLQAWASQDFDTIADITDQADLATEMLSTSFDGLQADSVELTLDSVDSRDTIATANFSVVWKLPRDREVSYDSSMTLTKMRNEWTVRWEPSLVHPKLGANQHLELRAIEAQRANVISSDGAPVLAPGSIYRVLVDPSAGDADVVVKRVADYLNEAHATDENVNTLDVEDIMSNLGDSTYSLTTVDANLGARMEQDLAGIPGLTFNEEASMVATDPGFAPDIVSRVARIVEDELEGSNGWRASIVTSNGAVIDDIAYDAPELAPSVRISLDHNVQRAAEEAVDLRAEMKAMMVVMRPSTGEILAVAQTDEADKDGDVALMGQYPPGSTFKIITAAAGLAHEGLTPDSIVPCPGTMNIYGRIVTNYNSFSLGNTSLDDAFANSCNTTFADIFHHLEPGQLKNVAKQFGLGIDYQIPGLDTMTGSVPEGDIVLDRTESGYGQGLDLASPFGMALVASTAATGSVPTPTLISGHETVASEEVLALDPEVLANVQRMMKSVVNDGTARGMRQTGGQIYAKTGEAEINEGSHAWFTGYREDDIAFATLVVLGGGSEAAAAVTDQFFVKLDELRAGGEVAVSEAEEQPVG

SEQ ID NO: 61 - DNA, 1962 bp, Corynebacterium glutamicum; identical to SEQ ID NO: 59
  CDS (101)..(1939): FRXA01608

SEQ ID NO: 62 - protein, 613 aa, Corynebacterium glutamicum; identical to SEQ ID NO: 60

SEQ ID NO: 63 - DNA, 1278 bp, Corynebacterium glutamicum
  CDS (101)..(1255): RXA01270
gcatgcacatgcagaaagcctcgctcctaataatctcgatagagatcgatttatgcaacgtgctggaaaactagcttcaacagattcggagatcatctaaatgactaatgaacgaatttttctatcatcgccagatgtaacacagttagaggaagacgcattggtacgcgcaatccgatcaggatggattgcaccgcttggtccagaagttgatgcgtttgagcaagaacttgctgagtattgtggccgcaaatatgttgttgcactttcatcgggtactgcagccctccacttaggtctattagcactaggcgttggagaaggagacttggttcttacatcatcaatgacttttgcagcgaccaccaacgcaattgtttatacgggtgctgagccaattttcgtggactgcgatgaatctggaaatatggatccagatcttttagaaaaagcctttgctgagctaaagagtgaaggaaaggaagtaaaggctgtagtacctgtcgatctacttggcaaagttgttcagcacgagaagattaaaaagattgctgatgaatacggggcagtagtgctttctgatgccgctgaatccttgggcgccattcgcaatggaaagtctgctgcagcatatggagtggcggcagcggtttccttcaacggaaacaaaattatgactaccagcggtggtggagctttgttaactgatgacaaggatattgcagacaacgtccgctatcttgcgacacaagctcgccaacctgtagttcattacgaacacaccgatgttgggtataactatcgcctttcaaatatcctcgctgcactgggacgagctcaactttcccgactcgacaagatgattgagcgtcgacgtcaacaccgtgcgttctatcgagaattgtttgcaggtgtttctggagtagagatctttggcgagccatcaggggtcgatggtggcgacactattgataatttctggctcacttctattcttattgataaagaagttgcgggatttagctctgaagatcttcgatcagttctaaatcaggcgaatattgagtctcgtcccttgtggaaaccaatgcatctccagccagtatttaagaagtatcgtagcttcaccaatgaagaaggacagaggctatttgattcagggctttctctcccaagcggttcagtacttgataatgcgtcaatgaatcgtgttgagactacaattggccagtttttggagagtcagcatgcgatctaagtacaaaaactatggcgtag

SEQ ID NO: 64 - protein, 385 aa, Corynebacterium glutamicum
MTNERIFLSSPDVTQLEEDALVRAIRSGWIAPLGPEVDAFEQELAEYCGRKYVVALSSGTAALHLGLLALGVGEGDLVLTSSMTFAATTNAIVYTGAEPIFVDCDESGNMDPDLLEKAFAELKSEGKEVKAVVPVDLLGKVVQHEKIKKIADEYGAVVLSDAAESLGAIRNGKSAAAYGVAAAVSFNGNKIMTTSGGGALLTDDKDIADNVRYLATQARQPVVHYEHTDVGYNYRLSNILAALGRAQLSRLDKMIERRRQHRAFYRELFAGVSGVEIFGEPSGVDGGDTIDNFWLTSILIDKEVAGFSSEDLRSVLNQANIESRPLWKPMHLQPVFKKYRSFTNEEGQRLFDSGLSLPSGSVLDNASMNRVETTIGQFLESQHAI

SEQ ID NO: 65 - DNA, 1797 bp, Corynebacterium glutamicum
  CDS (101)..(1774): RXN00549
aaagagcagcggcaaaaggcgcttaaagagcgactctaagggctacgctgtaagaaacaccatcattggtgccattgttgctgtcattttgattccagtaatggtcttcatgggtgcttacatcatggttgatgttccagaaccggaagagttggtttcaccccaggtttcgcagatttacgcatctgacggtgagactgaattggcacgcatcgttcctccagaaggcaaccgccagatggtgacgatcgatcaggtgcctgacactgtgaaaaatgcggtggtggctgcggaagaccgagagttttacacaaaccccggtttttccattactggctatgcccgagcagcacttggcgtaatcactggtgattcttcagcgggtggtggttccaccattactcagcagtatgtgaagaaggctgtggttggtgatgagcgttcgctgatccgtaaggctaaggaattggtctattccgcgaagatggccaatgagtggtctaaggacgaggtccttgaggcttatctcaacactgtgtacttcggtcgaaatgcctatggtgtgcaggctgcagctcatgcattctttgataagccagtagaagagctcacggctgctgagggcgcagtgctggcggccagtattcagctgccaagccagttggatccttggacaaatccagttgaggcggaaacgcgttggaactatgtcatggacggcctggtggaaattggcgctatctcggcagaggagcgcgcagttgctacctaccctgaaaccactgaccctgcgtccaacagtgcgtacaccgaagccaccggcactaatggtttgattaagaaccaagtgatggcggagttgtctgagcttggtatcactgaggatgatgtgcaaacctgtggtttgcaggtcaccaccaccattgatccaaagactcaggaaggtgccgttgaagcggtacaaaaccagttggatcttctgtctgagaacaaccgtgcagcggtagtctccattgatccttctaatggtgcggttcgtgcttattacggcggcgagaatgcgactggttgggactttgcaaacgctccgcttcagaccggttctacattcaagatctttggtctggcagcagcacttcagcaaggtattccactgtctcagccatacagctctgcgccggtgactgtgggtgatgctcaaatcggaaacgtcggtggcagcggttgtggttcctgttccatcgagcaggcgttgttgcattcttacaacaccagcttcattcgtttgcagcaggatctggaaaatggttcacaggatactgcggacatggcgcatgctttgggtatcgcgaagtctttgccaactatccctgagacactgactgaaaacggagagaccccttatgagggcatcatcttgggtcagtatgagtcccgcccacttgatatggcttctgcgatggcaactatcgctaatgaaggtgtctggcaccgcccgcacttcgtgtccaaggtggagactgtcagcggtgaggttctctacgagttcgaggatggcgacggcgagcgtcgtgtttctgaaaaggttgcactgaatctgctcaaggccatggggccaatcgctgcatactccaacggaaacgctctggctgatggccaggtttctgcatccaagactggtaccactcagcttggtgataccggtgcaaacaaggatgcgtggatgttgggtgcggcacctcagctagctactgcggtgtgggtcggaactgcttgataacactgcattgtataaca

SEQ ID NO: 66 - protein, 558 aa, Corynebacterium glutamicum
MVFMGAYIMVDVPEPEELVSPQVSQIYASDGETELARIVPPEGNRQMVTIDQVPDTVKNAVVAAEDREFYTNPGFSITGYARAALGVITGDSSAGGGSTITQQYVKKAVVGDERSLIRKAKELVYSAKMANEWSKDEVLEAYLNTVYFGRNAYGVQAAAHAFFDKPVEELTAAEGAVLAASIQLPSQLDPWTNPVEAETRWNYVMDGLVEIGAISAEERAVATYPETTDPASNSAYTEATGTNGLIKNQVMAELSELGITEDDVQTCGLQVTTTIDPKTQEGAVEAVQNQLDLLSENNRAAVVSIDPSNGAVRAYYGGENATGWDFANAPLQTGSTFKIFGLAAALQQGIPLSQPYSSAPVTVGDAQIGNVGGSGCGSCSIEQALLHSYNTSFIRLQQDLENGSQDTADMAHALGIAKSLPTIPETLTENGETPYEGIILGQYESRPLDMASAMATIANEGVWHRPHFVSKVETVSGEVLYEFEDGDGERRVSEKVALNLLKAMGPIAAYSNGNALADGQVSASKTGTTQLGDTGANKDAWMLGAAPQLATAVWVGTA

SEQ ID NO: 67 - DNA, 444 bp, Corynebacterium glutamicum
  CDS (101)..(421): RXN00550
aaggatgcgtggatgttgggtgcggcacctcagctagctactgcggtgtgggtcggaactgcttgataacactgcattgtataacacctggggtggcagtatgtatggttctaactcccctgccacgatctggaagcagaccatggataacgccctcgagaactcccctctcgaaacttgggatatcgctccagcattggggtacggtaacccaccagttccggaatatgtgtggactccaagtccaaacatcgcgactaatgatccagaaggagcaaccgaggaagctccagtggaggatccaaatgcagtaatcgatacccctgctgtagatcccactgcacctgcagaggagaccggtaacggtcaggtagaaatcctgccggggctgactatcccgggagatctcttagggatcggctaaaatccggtcgtagcctaaac

SEQ ID NO: 68 - protein, 107 aa, Corynebacterium glutamicum
MYGSNSPATIWKQTMDNALENSPLETWDIAPALGYGNPPVPEYVWTPSPNIATNDPEGATEEAPVEDPNAVIDTPAVDPTAPAEETGNGQVEILPGLTIPGDLLGIG

SEQ ID NO: 69 - DNA, 669 bp, Corynebacterium glutamicum
  CDS (101)..(646): RXN03091
gcaaggcttatccaatggttgtatcggcgctggcgatcggtggttttttttgcaataacgctcttgcaatatctttctgagcaggggaatcacccaagatatgctggcgaaggactcctacaccatcaaattgactttggatccagatgttcaggatgcagcgcacaatgcggtgtcctcccacgttgatccaaccaccccaggtgtcgctgaagttgtgaacgtcattgagcctggcgagaactcccgcgatattttggctattacttcttcccgcaactacggccttgacctggatgctggtgaaacgatgctgcctcaggcaacgtcccgtgtgggtaatggtgccggttccattttcaagatctttaccgccgctgcagccattcagcagggcgctggcctagacaccatgttggatgttccttctcgatatgaggtcaagggcatgggctccggcggtgccgcgaactgtcccgcaaatacttactgcgtggaaaacgcaggatcctacgcgcctcgcatgactctgcaggacgctctcgcgcagtcccccaacactgcattcgttgaaatgatcgagcaggttggcgtggacacccgttgtggatctttcagtaaagctgggcctgcgaagctacaccgatgaaggttccttcgacggcgaaa

SEQ ID NO: 70 - protein, 182 aa, Corynebacterium glutamicum
MLAKDSYTIKLTLDPDVQDAAHNAVSSHVDPTTPGVAEVVNVIEPGENSRDILAITSSRNYGLDLDAGETMLPQATSRVGNGAGSIFKIFTAAAAIQQGAGLDTMLDVPSRYEVKGMGSGGAANCPANTYCVENAGSYAPRMTLQDALAQSPNTAFVEMIEQVGVDTRCGSFSKAGPAKLHR

SEQ ID NO: 71 - DNA, 824 bp, Corynebacterium glutamicum
  CDS (1)..(801): RXN03178
cccaccaccgtggtcacgggcacgatggaagccgccaacatcgagggctcccgcgtgggtgtcggcgaggccggccagtataccgttgatcagctgctgcacggtcttcttttagccagcggtaacgatgcggcgtatatgttggctcaggaacttggtggggatcaagcaaccctggagaaagtaaacgcgctggccaaggagttgggcactcaagacaccttcgttgccacttattccggtttggatgcgccgggaatgtcgacctccgcatacgacatgtcattgatttatcagcatgcgtggcagaacccggttttcgagtcgattatctccaccgatcacattgatttccctggttggggcgacaatgagggtttccaagtctggaacgataacgccttgttcatgaacgatcctgatggcatcggcggcaagaccggctacaccgacgacgcgaaccacacctttgtcggcggtctcgatcggggtggtcgccgcctcgccgccgtactcttggattccaccgtcagcgacattcgtccgtgggaacaagcacgattgcttatcgacgcctccctccccatcacgccggggtccggcgtgggccagctgggctccggcagcgcgaacgatgtggcaccggcgaccccagaattaccagaacccaccgacaacctgacttcaggtgagggtgggtcgcagaacacgcttcttaagctcgtggtgcccatcggaatcatcgtgctgttgctaatcgccgcactagcgtggacattcagatctcccaagaaaaagaactaggtgttcttcttcacgacctc

SEQ ID NO: 72 - protein, 267 aa, Corynebacterium glutamicum
PTTVVTGTMEAANIEGSRVGVGEAGQYTVDQLLHGLLLASGNDAAYMLAQELGGDQATLEKVNALAKELGTQDTFVATYSGLDAPGMSTSAYDMSLIYQHAWQNPVFESIISTDHIDFPGWGDNEGFQVWNDNALFMNDPDGIGGKTGYTDDANHTFVGGLDRGGRRLAAVLLDSTVSDIRPWEQARLLIDASLPITPGSGVGQLGSGSANDVAPATPELPEPTDNLTSGEGGSQNTLLKLVVPIGIIVLLLIAALAWTFRSPKKKN

SEQ ID NO: 73 - DNA, 749 bp, Corynebacterium glutamicum; identical to SEQ ID NO: 45
  CDS (1)..(726): FRXA02859

SEQ ID NO: 74 - protein, 242 aa, Corynebacterium glutamicum; identical to SEQ ID NO: 46

SEQ ID NO: 75 - DNA, 1437 bp, Corynebacterium glutamicum
  CDS (101)..(1414): RXN01267
tgctagttttaaagaggcgttgaggggtagtatcgcgtaagtttattagtggttagcgtagatttttcgaattgaagatgtttctgaaaggtatttagatatgtatgcagaaattaatggcggttttattccagagggcaccgtgcgggtaagcggcgcaaaaaactctgctactagacttctcgcggcggcactgctaaccgatgaggtggtgcatcttggtaatttcccaaccaagcttgtggatgttgaacataaaattcgctttattgaagagcttggcggaaaagtgcatgtcgaccatgatgagcaaattttagtagttgatgctaaggatcttgcagcgcgagaaatgactactgatgaactgaatattccgattcgaactacttatctcctagcagcagcgcagattgggcgtggggaaattgctcgagttccttttcctggggggtgtgctattggaggaggtcctgctggcggacgaggatatgatcttcatcttatggtctgggaacagctaggttgtaaaattcttgaaaaagatgatcacattgaagtaactgcaccccagggctttatcgggggagttattgactttcctatttctactgtgggaggcactgaaaacgcgttactatgcgcaagtattgcttcaggggatactaaaattgccaatgcttatattacccctgagataactgatcttattgaacttctgcgacgtatgggtgcggagatcactgtctacggtaccagccgtattcatgtaaagggtcgagcaggtcttttgcagggcgcatatatggacgtaatgccggatcgtattgaggcattgacgtggatcgtgtatggaattatttcaggcggaaggattaccgtcgaaggtgttccatttagctcgatggaagttccttttatccaccttgagaaggctggagtggatcttttccgtaattcaagttccgtatatattacaccagaatgcttgccttcaggctcagttcagccatttgagctagcgtgtggaactcaccccggagtaatttcggacatgcaggcactttttgttcttttaggattaaaaggtgcaggaacttcacgcgtctatgactatcgatacccagaaagaattgcatttgttgaggaattgacaaatctagtttcgggcgacaaattaagtgcagaggctggcaagatcactatccagggagatgctactttccggccaggatatgcgaactcaactgatctacgtggttctatggctgttgttttagcggcgctttgcgctgatggaaagtccacgattaataacgtccatatggcgttacgtgggtacaacgagttggataaaaaacttcgtttacttggtgcggatttaactatcagagaaggcgaagttccttcaccttaagaacgaaagttttacattga

SEQ ID NO: 76 - protein, 438 aa, Corynebacterium glutamicum
MYAEINGGFIPEGTVRVSGAKNSATRLLAAALLTDEVVHLGNFPTKLVDVEHKIRFIEELGGKVHVDHDEQILVVDAKDLAAREMTTDELNIPIRTTYLLAAAQIGRGEIARVPFPGGCAIGGGPAGGRGYDLHLMVWEQLGCKILEKDDHIEVTAPQGFIGGVIDFPISTVGGTENALLCASIASGDTKIANAYITPEITDLIELLRRMGAEITVYGTSRIHVKGRAGLLQGAYMDVMPDRIEALTWIVYGIISGGRITVEGVPFSSMEVPFIHLEKAGVDLFRNSSSVYITPECLPSGSVQPFELACGTHPGVISDMQALFVLLGLKGAGTSRVYDYRYPERIAFVEELTNLVSGDKLSAEAGKITIQGDATFRPGYANSTDLRGSMAVVLAALCADGKSTINNVHMALRGYNELDKKLRLLGADLTIREGEVPSP

SEQ ID NO: 77 - DNA, 1032 bp, Corynebacterium glutamicum
  CDS (101)..(1009): RXN00045
tgcgatggcagttcctcaccagagcctcagcgacgaagaaactgctcgcattcacgccattgttgatgaattcctgtacaccgcttaaggcccacacctcatgactgatcccacttgcacccttgcccttgatattggtgccacaaagattgcctacgcactagtccccgataacaccccgacgacaacattgtccacgggacgcttgggaacaaaagaaggcgacagccctatcgagcagatccggctggttcttctggcaggcttaaaagctgccgaggaacacggtctcagtgtcgcccgcatcggcatgggcgctcctggtgtaattctgggaccagagggaaccatcgtgtacaacggtgaaaccctcacagagtgggcaggcactgacctgcgaggattatcccgagaagtcctcaacgttccattcgcggcacacaatgatgtccgcgtatgggcctacggtgagcaccacttaggcaccggcaaagacctcaccggcagggtactctacgtgtccctcggcactggagtcggcggagcaatcatcgaagacggaatcatgatgagtagccccactggaactgcgggagaattcgcagaagttgtgtgctctgaccatgcaggattagccgttcggtgcgaaaatgtagcaagtggcaccggcctaaccaggtactacaacgaggccgccgcaactcaacttgaccttcccgccatcatggagcgcttccaccaaggtgacggcctggcacagcaaatcattactggaaatctccgaggctttggccaagcgctaggcgcattagtcacagtgctggacctttccgcagtagtagttggaggcggagtcgcaggcatcggcgcacccgtcatggatcccatcaccgcagggattttcgatcgagtgttaacccccaacaaatccgtacaagttttaagcacgtcccttggtgcccaagcagccgtcatcgcagcagcaaaatatgcccgcgataacgccttttaagcacctaaaacgctgttctc

SEQ ID NO: 78 - protein, 303 aa, Corynebacterium glutamicum
MTDPTCTLALDIGATKIAYALVPDNTPTTTLSTGRLGTKEGDSPIEQIRLVLLAGLKAAEEHGLSVARIGMGAPGVILGPEGTIVYNGETLTEWAGTDLRGLSREVLNVPFAAHNDVRVWAYGEHHLGTGKDLTGRVLYVSLGTGVGGAIIEDGIMMSSPTGTAGEFAEVVCSDHAGLAVRCENVASGTGLTRYYNEAAATQLDLPAIMERFHQGDGLAQQIITGNLRGFGQALGALVTVLDLSAVVVGGGVAGIGAPVMDPITAGIFDRVLTPNKSVQVLSTSLGAQAAVIAAAKYARDNAF

SEQ ID NO: 79 - DNA, 1812 bp, Corynebacterium glutamicum
  CDS (101)..(1789): RXN02704
cgtctttggacatgttcaaaggcatgggccagcgtggcgacctctttgcacacaacatcattggcacaatcaaaggattaacggaagagaaaggctgatcatgaccaccggagcctcaaaaaaacccgcacgtccgaacactggcgctaaaaccagaacggggctgggaattagggagcgtatttccggtgcatggaatgatcttctcgcgcgccctttaactgactacatcatgatcttgtgcatcgtggtcattttgtcgtgcctcggtgtagtcatggtgtattcctcctcaatgacatggtcgttgagggaaggtggctccgtgtggggtactgccgtgcgccagggcatcatgatcgtgttgggtttctttgccatgtgggtggcgttgatgacgcgcccgcaaaccattagaaacctatccaacctgatattgattgtgtctattgtcttgctgcttgccgtgcagattcctggcattggtacaggtaaagaagaggtcgggtcgcagtcgtggattgctcttggacctattcagtttcagccttcggagatcgccaaagtggccattgccgtgtggggagcgcactacctcgcaggcaagggccctgtgcagcactggttcaataatcacttgatgcgttttggtggcgtcggtgcattcatggcgtttttgatcttcatggaaggcgacgccggcatggcgatgtctttcgtgctggttgtattgttcatgctgttttttgcgggcatcgccatgggttggatcgcgattgccggcgtactgattatcgcagccctcgcagtcctggcattgggcggaggcttccgttcaagccgattcgaggtgtatttcgatgcgctgtttggcaatttccacgatgtgcgaggcattgccttccagtcctatcagggcttcctctctcttgcagatggttccggcttgggagttggtttgggccaatcaagggcgaagtggttctacctgcccgaagctaaaaatgacttcatctttgccatcattggtgaggagctggggctgtggggtggcgctctggtcatcgcacttttcgcggggctgctgtacttcggtctgcgcacagccaagaagagccacgatccattcttgggcttgatggctgcaaccttgacggcatccgtggtgtcgcaggcgttcatcaacattggctacgtggttggtctgctgccagttaccggtattcagctgcccatgatttccgccggtggtacctccgcgatcattaccttggcttccatgggcttgctcattagctgtgcacgccacgaaccagagacagtttctgcgatggcttcctatggacgccccgcaatcgatcgacttctgggattgcgtgagccttcaagtactttgaccaccagtaatgcatccttgcgttccaacaaaaccaaggccgctaaacaaaagccgagtcctcagaaagagtctcgggaccgcttcggcgagcctgtgaccgcacgccgagcgcaggcgccacgaagtgggcgagctggagtacaatcggaagctccgcgacgctcgactggtagcgtcaaaggtcgaagcagtggtcaggacaacggtcgaagcaacgaaggtacggcgcgtagccaatcaactactggtgggcgcgcagccgatcgcagcgttgatcgaagtcgtcaaagcaggcctaccgagcgccgttccgagagtcgcgcgatgattggcgtgacaaccgcaaccgcagataaatgtgaaatcaggagaactacgaataaagatggctaactccccaaaacccatgcggg

SEQ ID NO: 80 - protein, 563 aa, Corynebacterium glutamicum
MTTGASKKPARPNTGAKTRTGLGIRERISGAWNDLLARPLTDYIMILCIVVILSCLGVVMVYSSSMTWSLREGGSVWGTAVRQGIMIVLGFFAMWVALMTRPQTIRNLSNLILIVSIVLLLAVQIPGIGTGKEEVGSQSWIALGPIQFQPSEIAKVAIAVWGAHYLAGKGPVQHWFNNHLMRFGGVGAFMAFLIFMEGDAGMAMSFVLVVLFMLFFAGIAMGWIAIAGVLIIAALAVLALGGGFRSSRFEVYFDALFGNFHDVRGIAFQSYQGFLSLADGSGLGVGLGQSRAKWFYLPEAKNDFIFAIIGEELGLWGGALVIALFAGLLYFGLRTAKKSHDPFLGLMAATLTASVVSQAFINIGYVVGLLPVTGIQLPMISAGGTSAIITLASMGLLISCARHEPETVSAMASYGRPAIDRLLGLREPSSTLTTSNASLRSNKTKAAKQKPSPQKESRDRFGEPVTARRAQAPRSGRAGVQSEAPRRSTGSVKGRSSGQDNGRSNEGTARSQSTTGGRAADRSVDRSRQSRPTERRSESRAMIGVTTATADKCEIRRTTNKDG

SEQ ID NO: 81 - DNA, 1812 bp, Corynebacterium glutamicum; identical to SEQ ID NO: 79
  CDS (101)..(1789): FRXA02704

SEQ ID NO: 82 - protein, 563 aa, Corynebacterium glutamicum; identical to SEQ ID NO: 80

SEQ ID NO: 83 - DNA, 1449 bp, Corynebacterium glutamicum
  CDS (101)..(1426): RXA02722
acttttagataagctctcacagtgctgactgcttatctgagatgaaaataaaagcaaaattttttttagtatcaactcttcgaaaggcgagacatcgacaatgacctcaccgaacaactacctcgccaagattaaggtcgtcggcgtgggcggcggcggagtcaacgccgtcaaccgcatgattgaagaaggcctcaaaggcgtggagttcatcgcggtgaacaccgactcgcaggctctcatgttctctgatgccgacgtaaagctcgatatcggacgtgaagctacccgtggtcttggtgccggcgcgaacccagaagttggacgtgcctcggcagaggatcacaagaacgaaatcgaagaaaccatcaagggcgccgacatggtcttcgttaccgccggcgaaggtggtggcaccggaactggtgctgcaccagtcgtggcagggatcgccaagaagatgggcgcactgaccattggtgttgtgaccaagcctttcgagttcgaaggccgtcgccgtactcgccaggcagaagaaggcatcgcagcactgaaggaggtctgcgacaccctcatcgttattccaaacgaccgcctgcttgagctgggcgatgcgaacctgtccatcatggaagcgttccgcgcagccgatgaagttctccacaatggtgttcagggtattaccaacctgatcaccatccctggtgtgatcaacgtggacttcgcggacgttcgctccgtcatgtccgaagctggttccgcactcatgggtgtgggctctgcacgtggggacaaccgcgttgtctctgcaaccgagcaggccatcaactctccacttctcgaagcaacaatggacggcgcaactggcgtcctgctgtcctttgctggtggatccgacctgggcctcatggaagtcaacgcagctgcatccatggtccgtgagcgttccgatgaagatgtcaacctcatcttcggtaccatcatcgacgacaacctgggcgacgaagtccgcgtaaccgtcatcgcgaccggttttgacgcagctcgcgcaagcgccgctgagaaccgccgcgcaggcatctcagctgcacctgcagctgagccagtccagcagcaggtcccaaccaccaacgcaacccttccaccagagaaggaaagcatcttcggtggtgcacgtgaggagaacgatccttacctgtcccgctctgctggtgcacgtcatcgcattgaggagacccgctccggcggtggactcttcaccaccggcaatgatcgcgattaccgtcgtgatgagcgccgcgaagatcaccgtgacgagcgccgcgatgagcgccgcgatgaccgttcctacgaccgccgtgatgatcgtcgtgacgatcgccgcgatgaccgcggagacgacctggatgtacccagcttcctccagtaattaagaaggagaatagactt

SEQ ID NO: 84 - protein, 442 aa, Corynebacterium glutamicum
MTSPNNYLAKIKVVGVGGGGVNAVNRMIEEGLKGVEFIAVNTDSQALMFSDADVKLDIGREATRGLGAGANPEVGRASAEDHKNEIEETIKGADMVFVTAGEGGGTGTGAAPVVAGIAKKMGALTIGVVTKPFEFEGRRRTRQAEEGIAALKEVCDTLIVIPNDRLLELGDANLSIMEAFRAADEVLHNGVQGITNLITIPGVINVDFADVRSVMSEAGSALMGVGSARGDNRVVSATEQAINSPLLEATMDGATGVLLSFAGGSDLGLMEVNAAASMVRERSDEDVNLIFGTIIDDNLGDEVRVTVIATGFDAARASAAENRRAGISAAPAAEPVQQQVPTTNATLPPEKESIFGGAREENDPYLSRSAGARHRIEETRSGGGLFTTGNDRDYRRDERREDHRDERRDERRDDRSYDRRDDRRDDRRDDRGDDLDVPSFLQ

SEQ ID NO: 85 - DNA, 1023 bp, Corynebacterium glutamicum
  CDS (101)..(1000): RXA00009
gacgacatgcgcaggcgagtaatcgaactgcaattgggcaaactagtccgcgatgatgcccacggcgtctacggcgaaatgcgataggggagtacttcacatggcttttggatatgtactgcgtgaagctgttcgcggcatgggccgcaacgtcaccatgaccatcgcgctcatcatcaccacctctatttccttggcacttcttgccactggatttttggtgaccaacatgaccgaccgcaccaaggacatctacctggatcgcgtcgaagtgatgatccaactcgatgaggacacctctgccaacgatcccgaatgcaccgcggagtcctgcaccgaagttcgtgatgtcttagaaggactcgacggcatcgattccatcacctaccgttcccgcgaggcctcctacgaacgattcgtagaagttttcaaagatactgacccagttctcgtcgctgaaacctctcccgacgcattgccagcagcgttccacgtccgacttgaagatccacttgccgttgagattctcgatccggtccgcgatcttcctcaagtaagcaacgtgatcgaccaggtggatgatctgcgcggagcaaccgaaaaccttgactccatccgcaacgccaccttcctcatcgcggctgtgcaagttttggcatcgatcttcctgattgccaacatggtgcaaatcgctgcattcaatcgtcgtgaagaaactgaaatcatgcgcatcgtcggcgcatcgcggttctacactcagggaccattcgtcttcgaagcgattctatccaccctcattggtgcggttttcgccgtcggcgcgctcttcttgggtaaagaactcgtcattgataaagcactccgcggactctacgattcccagctcatcgcaccagttaccaccacagatatttggctggtcgcaccgataatttccggcattggcgtggtgatcgccggcattatcgcacaactcaccctgcgcttctacgtgaggaaataagactattgaactccttgccg

SEQ ID NO: 86 - protein, 300 aa, Corynebacterium glutamicum
MAFGYVLREAVRGMGRNVTMTIALIITTSISLALLATGFLVTNMTDRTKDIYLDRVEVMIQLDEDTSANDPECTAESCTEVRDVLEGLDGIDSITYRSREASYERFVEVFKDTDPVLVAETSPDALPAAFHVRLEDPLAVEILDPVRDLPQVSNVIDQVDDLRGATENLDSIRNATFLIAAVQVLASIFLIANMVQIAAFNRREETEIMRIVGASRFYTQGPFVFEAILSTLIGAVFAVGALFLGKELVIDKALRGLYDSQLIAPVTTTDIWLVAPIISGIGVVIAGIIAQLTLRFYVRK

SEQ ID NO: 87 - DNA, 810 bp, Corynebacterium glutamicum
  CDS (101)..(787): RXA00010
cttaagaattaccggttatttgtcgttgagttctcctctgagcactcagggtagtcacttccgtttctttagccacaggagtttcgctaaagtgtgacccgtgatcaccttcgagaacgtcaccaagaactacaagacatcaacccgccctgcattagacaatgtgtccctacacattgaaaaaggcgagttcgtgttcctcatcggcccatccggctccggaaaatcaaccttcctgcgcctgatgacgcgggaggaaaacgtcagctccggatcgctgacactggctgattttcaggtgaacaaacttcgcggcacgcaagtaaacaaactgcgccaacgcatcggatatgtgttccaagatttccgactcttaaaaaacaagaatgtctacgacaacgtcgcattcgcattggaggtcatcgggaagaagaaggacaagattcaagaacttgtccccgaaactctggaaatggttggccttgccggaaaagccaaccgcatgcccaacgaactatccggtggtgagcagcagcgcgtggccatcgcccgagctttcgtgaaccgcccactcgtcttgcttgctgatgaaccaaccggcaacctcgaccccgatacctccgatgagatcatgattttgctcaaccgcatcaatcgcctcggcaccacggtggtcatgtccacccacaacgcccgaactgtcgacgacatgcgcaggcgagtaatcgaactgcaattgggcaaactagtccgcgatgatgcccacggcgtctacggcgaaatgcgataggggagtacttcacatggctt

SEQ ID NO: 88 - protein, 229 aa, Corynebacterium glutamicum
VITFENVTKNYKTSTRPALDNVSLHIEKGEFVFLIGPSGSGKSTFLRLMTREENVSSGSLTLADFQVNKLRGTQVNKLRQRIGYVFQDFRLLKNKNVYDNVAFALEVIGKKKDKIQELVPETLEMVGLAGKANRMPNELSGGEQQRVAIARAFVNRPLVLLADEPTGNLDPDTSDEIMILLNRINRLGTTVVMSTHNARTVDDMRRRVIELQLGKLVRDDAHGVYGEMR

SEQ ID NO: 89 - DNA, 1605 bp, Corynebacterium glutamicum
  CDS (101)..(1582): RXA00143
ggacacccggtgtatacccactgggacctcataaatccactgacttggagaagcccctgtgagtctgaccacaagccattttattccttttccccgagaaatggtctgggattggcatacccgcaagggcgctgtcgcacgtctgactcccccattcatcccacttaaccccattacgcaggcagaacgcctcgccgacggcaccaccatcttcagtctccccgcgggacttaaatgggtggcacgccacgatttatccgggtttttgaacgggtcacgcttcaccgacgtctgcctcaccgcccctgtgaaggccctcgcaaactggcgccacgtgcataatttcgtcgaccaagacggcggcacactcatcacagattccgtgagcacccgcctaccggcatccacactcacgggcatgttcgcctatcgccaaactcagctcatcgaagacctaaaattcttaagtagaacaagcacgcttttcgacggctcccccctcaccgtagccatcaccggctccagggggctcgtcggccgcgcgctgacagcgcagctgcaaaccggcggccacgaagtcatccaactcgtgcgcaaagaacccaaacctggccaacgtttctgggatccactcaacccagcatccgatctcctcgacggcgcggatgttttggttcaccttgccggcgaaccgatcttcgggcgattcaacgactcccacaaagaagccatccgcgagtcccgcgtacttcccaccaaattcctcgcagaattagttgccgaatccacccagtgcaccaccatgatttccgcctctgcagttggattctatggtcacgaccgcggcgacgagatcctgaccgaagaatccgaatccggcgatgatttcctcgccgaggtctgtagggattgggaacacgccactgctcctgcctcagatgcaggaaagcgcgtagccttcattcgcaccggcgtggccctcagtggacgcggtggcatgcttcccctgctgaaaaccctgttctccaccggactaggcggaaaattcggcgatggcacctcctggttcagctggatcgccatcgatgacctcaccgacatctactaccgcgccatcgtggacgcccagatctccggccccatcaacgcggtagcccccaatccagtctccaatgcggacatgaccaagattctggccaccagcatgcaccgtcccgcattcatccaaattccttccctcggccccaaaattctgctcggaagccaaggcgctgaagagctagccctggcgtcccaacgcaccgccccagcagcactggaaaacctcagccacaccttccgctacaccgacatcggggccgccatcgcacacgaacttggctacgaacaactcgcagatttcgcccaacagcaagaaatcgaagccgaacgcaaacaggaacgagccgaactcaaagccgccaagaagatcgccaagaaagccccagtcctagaggaatcccccaccaacctggaagatcccgaagaagtagagcaaagtatcctttcatcaatcctcaatttccgccgtaagcgcaacgactaaaaccaccatctgtagtgtgg

SEQ ID NO: 90 - protein, 494 aa, Corynebacterium glutamicum
MVWDWHTRKGAVARLTPPFIPLNPITQAERLADGTTIFSLPAGLKWVARHDLSGFLNGSRFTDVCLTAPVKALANWRHVHNFVDQDGGTLITDSVSTRLPASTLTGMFAYRQTQLIEDLKFLSRTSTLFDGSPLTVAITGSRGLVGRALTAQLQTGGHEVIQLVRKEPKPGQRFWDPLNPASDLLDGADVLVHLAGEPIFGRFNDSHKEAIRESRVLPTKFLAELVAESTQCTTMISASAVGFYGHDRGDEILTEESESGDDFLAEVCRDWEHATAPASDAGKRVAFIRTGVALSGRGGMLPLLKTLFSTGLGGKFGDGTSWFSWIAIDDLTDIYYRAIVDAQISGPINAVAPNPVSNADMTKILATSMHRPAFIQIPSLGPKILLGSQGAEELALASQRTAPAALENLSHTFRYTDIGAAIAHELGYEQLADFAQQQEIEAERKQERAELKAAKKIAKKAPVLEESPTNLEDPEEVEQSILSSILNFRRKRND

SEQ ID NO: 91 - DNA, 1684 bp, Corynebacterium glutamicum
  CDS (101)..(1684): RXA00277
atgtggtggacaatgttcgacgattggttcggaccttatctctggtcctacggtccaccacagctgcagtacatgccagaggaagaagggacagaaaacgatgaaggataatgaagatttcgatccagattcaccagcaaccgaagctgttgccttcaaccctttcgacgatgacgatgaggatgattcccccgctacctcagccgttgcctttaacccttttgaagatgacgatgacgacgatgagttccaaggcgaaggcctagaattcctgctgcgcgacctcgacaatctgcgagccacccaaggtcaaatggtggtggaacaaccagcagttgaagacagcctcgggtcagcatctgcgcatacggagacaactgcggcctcactgcgtccccgcccagaggtggatccaagtgagaggagtcgtcgacaagcaatttcgctgttccgcgaacggcgccgcgtaaggcgccaatcccgcccagttgctgatggcatggtggaattgccgttcatcacccccaaaccggaagatgagctgctcatcgacccggaaaagaagcgcaaacctggtgtggcagcgccgcaacttgtcgcgggcgatatcgtcgcagagcaatatgaagtcctcggcgtcatcgcgcacggcggcatgggttggatttacctcgccaacgaccgcaatgtgtccggccgcatcgtggtgctcaaaggcatgatggcgcaatcttccgttcaagaccaaggcaccgctgaagccgaacgcgaattcctcgccgacatcacccaccccggcatcgtgaaggcctacaacttcatcgacgacccccgcgtccccggcggattcatcgtcatggaatacgtcaacggcccctccctgaaagaccgctgcaaagcccaacccgacggcgtgctccgcgtcgacctcgccatcggctacatcctcgaactcctccccgccatggactacctgcaccaacgcggcgtagtgtacaacgacctcaaacccgaaaacgtcatcgccaccgaagaccaagttaaactcatcgacctcggcgcggttaccggcatcggcgcattcggctacatttacggcaccaaaggattccaagcacccgaagtagccacccatggcccctcaatctcctccgatattttcaccatcggacgcaccctcgcagcactcaccatgcccctccccgttgaagacggtgtcctcgcaccgggcatcccctcgcccaaaaattcacctcttctgcgcaggcatttgtcgttctaccgcctcctgcaacgcgccaccgccgacgacccccaacaccgattccgcaacgtcagcgaactacgcacccaactctacggcgtactgcgtgaaattttggcagtccgcgacggcaaacaatacccgccacagcactcactattctccccacagcgaagcacctttggcaccaaacacctcgtgttccgcaccgaccgcatcatcgacggcatcgaacgacaagcacgcatcacagcaccagaaattgtctccgcgctgcctgtcccactcatcgaccgcaccgaccccggcgcccgtatgctctccggatcctcctatgcagaaccctccgaaaccctggaaactctgcgcaactccatggaagacgagcaataccgccaatcaatcgagatccccctcggt

SEQ ID NO: 92 - protein, 528 aa, Corynebacterium glutamicum
MKDNEDFDPDSPATEAVAFNPFDDDDEDDSPATSAVAFNPFEDDDDDDEFQGEGLEFLLRDLDNLRATQGQMVVEQPAVEDSLGSASAHTETTAASLRPRPEVDPSERSRRQAISLFRERRRVRRQSRPVADGMVELPFITPKPEDELLIDPEKKRKPGVAAPQLVAGDIVAEQYEVLGVIAHGGMGWIYLANDRNVSGRIVVLKGMMAQSSVQDQGTAEAEREFLADITHPGIVKAYNFIDDPRVPGGFIVMEYVNGPSLKDRCKAQPDGVLRVDLAIGYILELLPAMDYLHQRGVVYNDLKPENVIATEDQVKLIDLGAVTGIGAFGYIYGTKGFQAPEVATHGPSISSDIFTIGRTLAALTMPLPVEDGVLAPGIPSPKNSPLLRRHLSFYRLLQRATADDPQHRFRNVSELRTQLYGVLREILAVRDGKQYPPQHSLFSPQRSTFGTKHLVFRTDRIIDGIERQARITAPEIVSALPVPLIDRTDPGARMLSGSSYAEPSETLETLRNSMEDEQYRQSIEIPLG

SEQ ID NO: 93 - DNA, 1313 bp, Corynebacterium glutamicum
  CDS (1)..(1290): RXA00857
gcagtcggtattgaggtgccaaactctgaccgtgagatggttcgcctgggtgatgtgctcaatgcgcgtgccaccgtggaaaacaaagactccatgctcattggtttgggtaaggatattgaaggcgacttcgtgtcctactccgtgcagaaaatgcctcaccttcttgtggctggttccaccggttctggtaagtcggcgttcgtgaactcgctgctggtgtcactgctcacgcgtgcaaagccagaagaagtccgtctgattctggtggacccaaagatggtggaactcacaccatacgagggcattccacacctgattacgccgatcattacccaaccaaagaaggccgcggcagcactgcagtggctggttgaggaaatggaacagcgctacatggacatgaaacaaacccgtgtgcgccacatcaaggacttcaaccgcaagattaaatctggcgaaattgagacccctccaggatccaagcgcgaataccgtgcgtacccatacatcgtgtgtgtggtcgacgagctcgctgacctgatgatgaccgcaccgaaggaaatcgaagagtccatcgtgcgcatcacccagaaggcacgtgccgccggtatccacctcgtgctggcaacgcagcgcccatccgtggacgttgtgaccggtctgatcaagaccaacgttccttcacgtttggctttcgcaacctcatcgctaactgactcccgcgttattttggaccagggtggcgctgaaaagctgatcggcatgggcgacgcgctgttcatcccacagggtgccggcaagccacaacgtatccagggtgcctttgtcaccgatgaagaaatccaagcggtcgtggacatggccaaggctcagcgccagcctgaatacaccgacggtgtcaccgaagataaggcttccgaagctaagaagatcgatgccgatatcggaaacgatctggaagatctcctcgaagcagtcgaactcgtggtgacctcacaaatgggatccacctccatgctgcagcgcaaactgcgcatcggttttgccaaggccggacgcctcatggacctcatggaaacccgcggtgtggtgggcccatccgaaggctctaaggctcgtgaagttttggtcaagccagaagagctggaaaccattttgtggatgcttaaaggtgcagaccccgccgacgcaccgaaggaagagacctgggatgacgaggtggcagcggaagctgaagaagcggctaacaccaccgtcgtgcaggctgatccttccaagggagtgtgttaaggctttaggagcctagtggc

SEQ ID NO: 94 - protein, 430 aa, Corynebacterium glutamicum
AVGIEVPNSDREMVRLGDVLNARATVENKDSMLIGLGKDIEGDFVSYSVQKMPHLLVAGSTGSGKSAFVNSLLVSLLTRAKPEEVRLILVDPKMVELTPYEGIPHLITPIITQPKKAAAALQWLVEEMEQRYMDMKQTRVRHIKDFNRKIKSGEIETPPGSKREYRAYPYIVCVVDELADLMMTAPKEIEESIVRITQKARAAGIHLVLATQRPSVDVVTGLIKTNVPSRLAFATSSLTDSRVILDQGGAEKLIGMGDALFIPQGAGKPQRIQGAFVTDEEIQAVVDMAKAQRQPEYTDGVTEDKASEAKKIDADIGNDLEDLLEAVELVVTSQMGSTSMLQRKLRIGFAKAGRLMDLMETRGVVGPSEGSKAREVLVKPEELETILWMLKGADPADAPKEETWDDEVAAEAEEAANTTVVQADPSKGVC

SEQ ID NO: 95 - DNA, 893 bp, Corynebacterium glutamicum
  CDS (1)..(870): RXA01435
cctcttgacctaggctttaccaccgaagcacgccaatggctcgaaaccctagagggacgcatcggcgacgactggcgacacaaatggttctccggaatcacctacctcctcctcgacgactacgccaccgcccaagtattcttcaaccacgtcctgaccatcctgcccggcgaagccgctcctaaactagccctcgcagctgttgacgaactcatcctccaacaaatcggcgccgaatccaccgcctatctcaccccagacatcgtctctgcaaccgcgaccctcagcaaagatttcgaagacctcgacgcctccgccttcgaatcactcagcgacacctggtcccacatctccagcgacccacacgtagtccgcttccattcactgcgcctctacgcacttgtctgggcaaccaaccccaccaccgtgtcctccgcgttcgggctcgcccgccaactcatggccgaaaaccaaatcgaactcgcagtccaagccctagacaaactcccccaatcatccacccactaccgaatggccaccctcaccaccatcttgttgctggtcagctccaatttgagtgaatcccgcatccgacgggctgcccgccgactcaccgaaatccccacaaacgaaccccgcttcaaccaaatcaaaattgccatcatgtcggcaggcctcagctggcttcgagagcgaaaactcaaagcttccgcctccgcgaaccctttgtttgaatacccgttctcccaaaaaggcctgcgcaccggcatctccgaggcactccgcattcaggcacgttctgcaccgttcccgcaccaccgttacgcacttgtggatatggcgaatgccgtgcggccactgagttggttctagctgttttgacttggggctat

SEQ ID NO: 96 - protein, 290 aa, Corynebacterium glutamicum
PLDLGFTTEARQWLETLEGRIGDDWRHKWFSGITYLLLDDYATAQVFFNHVLTILPGEAAPKLALAAVDELILQQIGAESTAYLTPDIVSATATLSKDFEDLDASAFESLSDTWSHISSDPHVVRFHSLRLYALVWATNPTTVSSAFGLARQLMAENQIELAVQALDKLPQSSTHYRMATLTTILLLVSSNLSESRIRRAARRLTEIPTNEPRFNQIKIAIMSAGLSWLRERKLKASASANPLFEYPFSQKGLRTGISEALRIQARSAPFPHHRYALVDMANAVRPLSWF

SEQ ID NO: 97 - DNA, 1065 bp, Corynebacterium glutamicum
  CDS (101)..(1042): RXA01511
gggcgtgtgtttacctttgcttttgtgtctaatggttccgcgattgtgccggcgcgtgaggctttggatgagatggcgtcgattctgagggacttttaaggtggcatccctcatcgggaatcttgagctgcctagggtaagccctaatttcttggaattacgcaaggcggtgcgcccttacctgaaagagcatgtgcacattgggttgtcgggcgggccggattcattggcgctggtggctgctgtgctcgcggagaaatcccaggtaacggcgatttgtatcgatcataatctgcagaccggttctgctgaagtcacgcacaacgctgctgcgatggcgcgccacatgggcgcacaggcgatcgtgaagagcatcgaggtcgcgccgggggaggggatggaggccgccgccagggaggctcggtacgcggcttttgcgcagctcaccgatgagatttgggtggcgcacaccatggatgatcaagccgagacctatctccttggcggtttgcgggggaatcccgcgggcatgaaagatgcttctcgacgccccgagctatccattattcgaccccttctgggggctcggcgtgcgcacacgcacggggcgtgcgtggagttggggttgaaaccgtggcacgatccgcaaaattttgacgatgcctttcggcgggtagccatccgaaaccaggtgattcctcttcttgcgcaggtgcacgggggagaccctgtacctggtttggcacttgcggcgcgacgcgctgtggaggatgccgaagtggtggagggcgacgtcgagaagcggcgtttagagtggcaggacggttttcctgtgacgttggccggggaacctacgggccttaggcgacgcatgttggcggattttttgcgtggggaaggcatcgctgtgacctcgaggaaactcgacgccattgaccgattgctcaccgattggcgcggacagggtggcgtagccgtgggtaaaagcgataatggaaggttggaagtggtgcggcaaagtggcaagcttaagatcactgattgacacctgaatctacaacacaa

SEQ ID NO: 98 - protein, 314 aa, Corynebacterium glutamicum
VASLIGNLELPRVSPNFLELRKAVRPYLKEHVHIGLSGGPDSLALVAAVLAEKSQVTAICIDHNLQTGSAEVTHNAAAMARHMGAQAIVKSIEVAPGEGMEAAAREARYAAFAQLTDEIWVAHTMDDQAETYLLGGLRGNPAGMKDASRRPELSIIRPLLGARRAHTHGACVELGLKPWHDPQNFDDAFRRVAIRNQVIPLLAQVHGGDPVPGLALAARRAVEDAEVVEGDVEKRRLEWQDGFPVTLAGEPTGLRRRMLADFLRGEGIAVTSRKLDAIDRLLTDWRGQGGVAVGKSDNGRLEVVRQSGKLKITD

SEQ ID NO: 99 - DNA, 2682 bp, Corynebacterium glutamicum
  CDS (101)..(2659): RXA01513
ccctcaacttcgtttgattagttgtctagtagatcccttttattcgattccgagaaaggcacgggcaaaacggccttagttgagccggttgccactgcgtatgaaaaacaagaaatacctgcagttcggcggtatcgcagccgtaatcctcatcgttctgttcttggtgtccctgtttagcagtgacaccaggaacttccaggaggtcgatacctctgttgcgatggcacagcttgacgccggaaacgtcgccgaagctcaaatcgatgacagggaacagcgcgtccgactgaccttgcgtgaacccatcacggtggatgaacgcgaaggcgttgaagagatcctcgcgcagtacccagctcgtaccgcgccagcgatctttgagaaggtggaagcatccaacactgattcctataccaccaatgtgacgcaggagagcttcctgatgtccatgctgagcttcatcctgccgatggtgatcatcttcggtttgctgatgttcttcctcacccgcatgcagggtggtggcatgtttggcatcggtggatccaaggccaagcagctgaccaaggatatgcccaccaacaccttcgcggatgttgctggcgctgaagaagcagtggatgaactccatgagatcaaggacttcctggaagaccccacccgctacgaagccctcggagcgaaaatccctcgtggtgtgctgctttacggccctcccggtactggtaaaaccctgctggctcgtgccgtagctggtgaggctggcgtgccgttctactcaatttccggttctgactttgtggaaatgttcgtcggtgttggtgcctcgcgtgtgcgtgatctgtttaagcaggccaaggaaaacagtccctgcatcatcttcgtcgatgagatcgatgcggttggtcgcgcccgtggctcaggaatgggtggcggacacgatgagcgtgaacagaccctgaaccagttgctcgttgagatggatggctttggtgatcgtcaaggcgtcattctgatggctgctaccaaccgcccagatgttcttgacccagcgctgctgcgtcctggccgtttcgaccgccagatcccagtcaccaaccctgacctacgcggccgtgaacagatcctggaagttcacgccaagggtaagcctttcgcacccgatgcagatatcaaggcattggcaaagcgcaccgccggcatgtccggcgctgacctggcaaacgtgcttaacgaagccgcgctgctaaccgcccgcgtgggtggcaacgtgatcaccgccgacgctctggaagaagcaaccgaccgcgttgtcggtggaccacgtcgctccggcaaggtgatttccgagaaggaaaagaaggtcaccgcctaccacgaaggtggacacaccctgtccgcatgggcgttggaagacatcgagcgcgtctacaaggtcaccatcttggcccgcggtcgcaccggcggtcacgccatgactgcccaagaagatgacaagggcatgtacaaccgcaacgaattgttcgcccgcctggtctttgccatgggtggacgctccgcggaagaactagtcttcggcgaacccaccaccggcgcctccgccgatattgaaatggccaccaagatcgcccgatccatggtgaccgaatatggcatgtccccagctgtcggcatggtgaaatacggccaagaacagggcgacccattctccggacgcggtggcggtggaaacttggaccactcccaagaagtcgcagcaaccatcgacaccgaagtccagttcctcctggacaaagcccatgaagtgtcctactccatcctggctgaataccgcgaccacctggaccgcctcgcggaaaaactcctggaaaaggaaaccctgcgacgcccagacctcgaagcgcttttcgacgacatcgtcccacgcaaggtcgccgaagtcttccccgacgagtccacacgattccctcgccaagaaaaccgcgaaccagtaaaaaccccagtggagctcgcactggaacgtggcgaagaaccaccaaagaagttctccattcttgaggcctcccgcgcaacccgcgaacgccgtcgcaaggaattggaagctcagggtaagttgccggtgcagcctgcgtcttctgccggcgtggcacctgcggccggagcagctgccggatcctatggcaccccacctccagctgattggagcgtgcccggttccgctggaaagcaccgctcacgtgcagaagaacagccagctgagcagggcttcccggctcagaccccggcacaagctcctgagcagtcccctgattcaagtggcggccgccccaacccttacgcgactccaaccgcatccggtgagcaccctggtatgaaggcctatggcttcggcgattccgaactcatggaccaatcaacaggtgcggaacataccccaggtaacgtttcacaggaatccccaaccgaaatgatcgggttccgtttgccggatcatgaacgttcggactacccagaaaaggcgcaaaaagagtcggtgctggatgcttctgaaaccacagaaatgcctgtcgttccagatcagcccatcgatggtgattccgggaagtccgctgagggcacacaggagaatccggaaaatgaaggagacaaccgtggataaccacgctgcagttcgcgagt

SEQ ID NO: 100 - protein, 853 aa, Corynebacterium glutamicum
MKNKKYLQFGGIAAVILIVLFLVSLFSSDTRNFQEVDTSVAMAQLDAGNVAEAQIDDREQRVRLTLREPITVDEREGVEEILAQYPARTAPAIFEKVEASNTDSYTTNVTQESFLMSMLSFILPMVIIFGLLMFFLTRMQGGGMFGIGGSKAKQLTKDMPTNTFADVAGAEEAVDELHEIKDFLEDPTRYEALGAKIPRGVLLYGPPGTGKTLLARAVAGEAGVPFYSISGSDFVEMFVGVGASRVRDLFKQAKENSPCIIFVDEIDAVGRARGSGMGGGHDEREQTLNQLLVEMDGFGDRQGVILMAATNRPDVLDPALLRPGRFDRQIPVTNPDLRGREQILEVHAKGKPFAPDADIKALAKRTAGMSGADLANVLNEAALLTARVGGNVITADALEEATDRVVGGPRRSGKVISEKEKKVTAYHEGGHTLSAWALEDIERVYKVTILARGRTGGHAMTAQEDDKGMYNRNELFARLVFAMGGRSAEELVFGEPTTGASADIEMATKIARSMVTEYGMSPAVGMVKYGQEQGDPFSGRGGGGNLDHSQEVAATIDTEVQFLLDKAHEVSYSILAEYRDHLDRLAEKLLEKETLRRPDLEALFDDIVPRKVAEVFPDESTRFPRQENREPVKTPVELALERGEEPPKKFSILEASRATRERRRKELEAQGKLPVQPASSAGVAPAAGAAAGSYGTPPPADWSVPGSAGKHRSRAEEQPAEQGFPAQTPAQAPEQSPDSSGGRPNPYATPTASGEHPGMKAYGFGDSELMDQSTGAEHTPGNVSQESPTEMIGFRLPDHERSDYPEKAQKESVLDASETTEMPVVPDQPIDGDSGKSAEGTQENPENEGDNRG

SEQ ID NO: 101 - DNA, 1869 bp, Corynebacterium glutamicum
  CDS (101)..(1846): RXA02098
ccccatttcggcgacctcgactccatgaaagcaagagtttcaccacatttaacgtggggtacctgtgtgcatcggggtcaaacctgccactatagagggtatggatgcgactttttggatcattggactagtagtcctcgtggttctcgcgatcatcattgtattgatcgtaggaaatcagcgaggtaaatcaaagaccgttagttttgaaaaacctgaagagaataaaaaagaactaacccagcaagagaagtctggaaattaccaagcccaaggtggattcaacttcgccccagctaaacaaacagaagagccagtgctgcgtgaaggccaagatcttggcgcaccaaaggctgaaacaacaccgattgttccaccagtagttattccgccggcagctcctgaagaggaaaaggcgccggagcaatcgactgaaactttcgcagctcaaaagcctgctgaagaagcacctgcaactcctgaaccagaaacctctgatgatgttgtcgaggaaccagaagttaaggagcctgaggttaaagaagttgtcgctgttgagccagaggtcgaaactgaagagccagcagttgttgaagaacctgcagtagcagaggaaccagcaattgttgaggaacctgcagtagcagaggaacctgcagtagcagaggaacctgcagtagcagaggaaccagcaattgttgaggaacctgcagtagcagaggaacctgcagttgttgaggaacctgcagtagcggaagttcccgaaacaatcgaagaacctgcagttgaagaacttgcggcagttgctgaggtcaccgaggctgcagaggctgctcaggttgctgtggaatctgcggaagctgcgctggaggaaactccagttccagatgtggagccggagccagctgcggagcctattgatgagatcgtgccggcggcgggtcgtatcggtaagctgcgtggtcgtctttctcggtcacagagtgttttcggtaagtcagtgttgggcattttgtctgcgggtgacttggatgaagacgcatgggaagacatcgaagcgatgttgatcaaggcggatttgggcgccaagatcactgcgcgtgtggtggatgagctgcgtgacaagatcgcagagcatggtgttggtagtgaggcagaggcgcgtgcgatgctgcgtgcttcgctgattgatgcttgccgtcctgaccttgatcgctccattaaggctatgccgtatgagggtaagccaccggtggtgttggttgttggtgtgaacggtaccggtaagacgacgactactggcaagcttgctcgtgtgttggtgtccatgggtcataaggtgattcttggtgctgcggatacgttccgtgcggcggctgcggatcagttggagacgtggggtcgccgtgtgggtgcggagactgttcgtggcgctgagggcgcggatcctgcatctattgcgtttgatgctgtggctaagggtgttgagcgtcaggcggatgtcgttttggttgacactgcgggtcgtttgcacacgtcgactggtttgatggatcagttgggcaaggttaagcgcgtggtggagaagaaggcagtggtggatgaagtgctgctggttttggatgccacggttggtcagaacggtatgcagcaggctcgtattttccgtgaagttgtggatattacgggtgtggtgttgaccaagctggatggtactgcgaagggcggaatcgtgttccaggtgcaggaagagttgggtgttcctgtgaagcttgttggtcttggtgaaggtgcggatgatttggcaccgtttgaggttgagggcttcgtggacgctttgctgggctagaaacccgataagcgagaacc

SEQ ID NO: 102 - protein, 582 aa, Corynebacterium glutamicum
MDATFWIIGLVVLVVLAIIIVLIVGNQRGKSKTVSFEKPEENKKELTQQEKSGNYQAQGGFNFAPAKQTEEPVLREGQDLGAPKAETTPIVPPVVIPPAAPEEEKAPEQSTETFAAQKPAEEAPATPEPETSDDVVEEPEVKEPEVKEVVAVEPEVETEEPAVVEEPAVAEEPAIVEEPAVAEEPAVAEEPAVAEEPAIVEEPAVAEEPAVVEEPAVAEVPETIEEPAVEELAAVAEVTEAAEAAQVAVESAEAALEETPVPDVEPEPAAEPIDEIVPAAGRIGKLRGRLSRSQSVFGKSVLGILSAGDLDEDAWEDIEAMLIKADLGAKITARVVDELRDKIAEHGVGSEAEARAMLRASLIDACRPDLDRSIKAMPYEGKPPVVLVVGVNGTGKTTTTGKLARVLVSMGHKVILGAADTFRAAAADQLETWGRRVGAETVRGAEGADPASIAFDAVAKGVERQADVVLVDTAGRLHTSTGLMDQLGKVKRVVEKKAVVDEVLLVLDATVGQNGMQQARIFREVVDITGVVLTKLDGTAKGGIVFQVQEELGVPVKLVGLGEGADDLAPFEVEGFVDALLG

SEQ ID NO: 103 - DNA, 1134 bp, Corynebacterium glutamicum
  CDS (101)..(1111): RXA02713
tgatatgtggctatgacattgtcgcgcagtttttttatccacaaacataagtacaagacattggacatctaggccggcaggaaaaggggggaacacgcacatggaagatttttccttggatggcaaccacggacacgttcccgtaatgcgtgatcgtatggcggctttgatcgccgaacacgtggaagcattgggagaaaacgctgtcattgttgacgcaacccttggcgcaggcgggcatgcggagttcttcctgaacacgttccccaaagcgcgcctgattggccttgatcgtgaccaaaatgcgttgcgggatgctcgcgcgcgacttgctcctttcggggagcggttcattggcgtccagacgcgtttcgacggactccgcgaggtgttggaatctgtcgagggcgacatcattgatttagctcgcgagcacggtatcgctggcgctctgtttgatctgggtgtctcctcgatgcagcttgatcaggtggagcgtggctttgcctaccgcacggacgcgcctctggacatgcgcatggatgcaactcagggtattacggctgcagatatcctcaacacttattcgcatggtgacatcgctcgaatcttgaagacttacggcgatgaacgcttcgccggcaagattgcttctgcggtgctgaaagaacgtgaaaaagagccgttcactacctctgctcgtttggtggagcttctgtacgacgccatccctgcagcgacccgccgaaccggtggacaccccgcgaaacgtactttccaggcgttgcgcgttgaggtgaacaacgagcttgattccctgaagaatgtgcttcctcaaatcactgacgccctcaatgttgggggacgtgcagtgtttatgagctaccagtctcatgaggacaagctggtgaagaagttcttcacggatctgaccacctctaagacccctccgggcttgcctgttgatcttcctggaactgcaccacagtttaagcaggttactcgcggtgctgaaacggcttcggaagctgaaattgaagaaaacccacgtgccgcacctgtgaaggtgcgcgcaatcgaaagaatcggcaacaactcaggagacctctcatgaccatgacaaatggctcccgc

SEQ ID NO: 104 - protein, 337 aa, Corynebacterium glutamicum
MEDFSLDGNHGHVPVMRDRMAALIAEHVEALGENAVIVDATLGAGGHAEFFLNTFPKARLIGLDRDQNALRDARARLAPFGERFIGVQTRFDGLREVLESVEGDIIDLAREHGIAGALFDLGVSSMQLDQVERGFAYRTDAPLDMRMDATQGITAADILNTYSHGDIARILKTYGDERFAGKIASAVLKEREKEPFTTSARLVELLYDAIPAATRRTGGHPAKRTFQALRVEVNNELDSLKNVLPQITDALNVGGRAVFMSYQSHEDKLVKKFFTDLTTSKTPPGLPVDLPGTAPQFKQVTRGAETASEAEIEENPRAAPVKVRAIERIGNNSGDLS

SEQ ID NO: 105 - DNA, 789 bp, Corynebacterium glutamicum
  CDS (101)..(766): RXN02723
cgtgctcaccatgggtgcaggttccgtgaccatgcttgctccagaaatcctggatcagctgcaaaacaattaggacgtaagtgaacaaggcaggactagcgtgaacaaaaaagtcatcgccattgttgtgggtgtggttgttgtcctcgtggcaatcctgggcgttgttgcctggttcgttcccatcctcaaggtgggaaacattgaagtaaccggtgcaacgcgcacatatccggatcaagtactggaagtctccgggattgttgagggcaaaaacctcttccgcgtcgatgcgactgcagcagggcaaaacattgtggaattgccctgggtgaaatcggtgaccgttaaccgtgccctgccaagcaccatcaccgtggagctgacagagcgtgagcctgcagtgttcatcaagcgtgctgatggtgaccatgtcattgacaccgagggtaaagaaattatcattggaacacccccggtgggaacagtagaagtttctggcgcggatgaaggaaactcagaagtgcttcctgcggttattgctgtaatcaacgcaattaaagcgcaagatgcgcagatgacagaaagtatccaggtagtggaagctccggatcaatttgatatcttgctgaaaatgaatgatggccgggaaatctactggggatcctcggaaaacaaccacgataaagcggtggcaatgtcgactgttttgaagcgggaaggccaacgttggaacattagctcaccctcaatggtgacagtccgctaaagtggctgggtagttccggt

SEQ ID NO: 106 - protein, 222 aa, Corynebacterium glutamicum
VNKKVIAIVVGVVVVLVAILGVVAWFVPILKVGNIEVTGATRTYPDQVLEVSGIVEGKNLFRVDATAAGQNIVELPWVKSVTVNRALPSTITVELTEREPAVFIKRADGDHVIDTEGKEIIIGTPPVGTVEVSGADEGNSEVLPAVIAVINAIKAQDAQMTESIQVVEAPDQFDILLKMNDGREIYWGSSENNHDKAVAMSTVLKREGQRWNISSPSMVTVR

SEQ ID NO: 107 - DNA, 500 bp, Corynebacterium glutamicum
  CDS (1)..(477): FRXA02723
gatgcgactgcagcagggcaaaacattgtggaattgccctgggtgaaatcggtgaccgttaaccgtgccctgccaagcaccatcaccgtggagctgacagagcgtgagcctgcagtgttcatcaagcgtgctgatggtgaccatgtcattgacaccgagggtaaagaaattatcattggaacacccccggtgggaacagtagaagtttctggcgcggatgaaggaaactcagaagtgcttcctgcggttattgctgtaatcaacgcaattaaagcgcaagatgcgcagatgacagaaagtatccaggtagtggaagctccggatcaatttgatatcttgctgaaaatgaatgatggccgggaaatctactggggatcctcggaaaacaaccacgataaagcggtggcaatgtcgactgttttgaagcgggaaggccaacgttggaacattagctcaccctcaatggtgacagtccgctaaagtggctgggtagttccggt

SEQ ID NO: 108 - protein, 159 aa, Corynebacterium glutamicum
DATAAGQNIVELPWVKSVTVNRALPSTITVELTEREPAVFIKRADGDHVIDTEGKEIIIGTPPVGTVEVSGADEGNSEVLPAVIAVINAIKAQDAQMTESIQVVEAPDQFDILLKMNDGREIYWGSSENNHDKAVAMSTVLKREGQRWNISSPSMVTVR

SEQ ID NO: 109 - DNA, 750 bp, Corynebacterium glutamicum
  CDS (101)..(727): RXA01426
aaaaagcaccattcggcagccaacactcaagcttcttaagttgagtcgttatagttgagtgttgtaccgctcgatatcttgcccgaaggggacttttttcatgaccacgcctccagcagccgctgaaattttcggggacaacctcgaaaaagccattgcatatcatgaatctttggcaacagatggatccgtccgcggattcatcggcccccgtgaagttccccgcctgtgggatcgccacattctaaactgtggtgtcatcggcgaagctatggatgagggcatctctgttgcagatattggttctggtgcgggactgccaggaattcctcttgctatcgcacgcccagatctcaacatcactctcattgagccattgctcaagcgttcggtgtacctcaacgaggtaaaagaagccctgaacttggacaatgtcaccgtcgttcgtggtcgtgctgaggaaaaagtggtgcgcaagcaggtcggattggtcgatattgtcacctcccgagctgttgctccactgggcaagctagcgacctggtcgttgccgctggtgaaaatcggtggacgcatggtggccatgaaaggctccagcgttgaggaagaaattgagcgtgacgccaaggaaatccgcaaggctggcggcactgacattaaggtttataccgtgggtgaggcgctgttgagcgagcccacaacacttatttcaatccgcagggaaaagtaaccatccacttcggtggaatg

SEQ ID NO: 110 - protein, 209 aa, Corynebacterium glutamicum
MTTPPAAAEIFGDNLEKAIAYHESLATDGSVRGFIGPREVPRLWDRHILNCGVIGEAMDEGISVADIGSGAGLPGIPLAIARPDLNITLIEPLLKRSVYLNEVKEALNLDNVTVVRGRAEEKVVRKQVGLVDIVTSRAVAPLGKLATWSLPLVKIGGRMVAMKGSSVEEEIERDAKEIRKAGGTDIKVYTVGEALLSEPTTLISIRREK

SEQ ID NO: 111 - DNA, 1260 bp, Corynebacterium glutamicum
  CDS (101)..(1237): RXA01428
gcgatgaatccggtccgatcggcctaaaacctgcgaaatagcagtaaacttctttgaatacgttaattgttgtgctgtacgaaaggtgcgtctaagagcgatggctcagaacaagggttccgacaagtcccagacggaaaagcgtaagggcggtctggggcgcggtctggccgcacttattccctcaggaccaagtaattccccaggtcttggtggcggtgcggctgacatcattttgggcggtaccgtgggtgcgcgtactgctgcagctcccaagcgtgagtccacaccagcagctcctgcacctgaggctcctgcgcaggccgctccacaacacactgaggccacaaagccagaggtagttccagagccagcagctcctgctccaacgcagtcagcacagcaggaagcgccgcaggcacagccagcacagcagtctgagttcggcgcatcctaccttgagatcccgatcgagcagatccgccccaacccgcagcagcctcgccatgagtttgatccgcaggcacttgacgagttggtgcattcgatcagcgagttcggcctcatgcagccgatcgtggtgcgcaggtccgaggatggctatgagctcatcatgggtgagcgtcgttggcgtgcatccaagcgagctggccttgaggttatcccggcgattgtccgtgaaactgaagacagcgcgatgctgcgcgacgcccttttggaaaatatccacagggtgcagctgaatcctttggaagaggcagccgcctaccagcagttgctggaggagttcggtgtcacccaggcagagctggccgataagctgggccgttcccgtccggtaatcaccaatatgattcgtctgctgggccttccagtcaacgtgcagaccaaggtggcagccggtgtgctgtctgcaggccatgcacgcgcattgctggggctcaaggccggcgaggatgctcaggacaccctggcgacccgaatcatcgctgagggcctgtctgtgcgtgctactgaggaattggtgctgctgcacaaccgtggtgatcaggatgaggagaagaagccacgcgaaaaggctgcaactcctgaggtctttacccgtgcggctgagtccttggcggataatttggataccaaggtctcggtgatgatgggtaagaagaagggcaagctcgtggtggaattcggcgacaaggatgatttcgagcgcatcatgtccttgatccagggccaataattttaagtttggcgccatgc

SEQ ID NO: 112 - protein, 379 aa, Corynebacterium glutamicum
MAQNKGSDKSQTEKRKGGLGRGLAALIPSGPSNSPGLGGGAADIILGGTVGARTAAAPKRESTPAAPAPEAPAQAAPQHTEATKPEVVPEPAAPAPTQSAQQEAPQAQPAQQSEFGASYLEIPIEQIRPNPQQPRHEFDPQALDELVHSISEFGLMQPIVVRRSEDGYELIMGERRWRASKRAGLEVIPAIVRETEDSAMLRDALLENIHRVQLNPLEEAAAYQQLLEEFGVTQAELADKLGRSRPVITNMIRLLGLPVNVQTKVAAGVLSAGHARALLGLKAGEDAQDTLATRIIAEGLSVRATEELVLLHNRGDQDEEKKPREKAATPEVFTRAAESLADNLDTKVSVMMGKKKGKLVVEFGDKDDFERIMSLIQGQ

SEQ ID NO: 113 - DNA, 3441 bp, Corynebacterium glutamicum
  CDS (101)..(3418): RXA01640
catggtgctggcgatggtggcgctgatgatccttaccagtgggcagttaaatcctatggtcttgatttttccaatgatgatgggtatgagcgtcctgatgatgttcgccccacctgaaggtgacgatactgatgaggttcggcgcacctatttacgtcacctgggtgcattgcgggcgaaagcgacagatcacgcggcgatgcagcgcaggcatgaatggcacaggcatcctgatccagcaaccttgtggtccacgttggggactcggcggatgtgggagcgcacccaagatgatcaagattgtttggaaatccgttttggtttgggcgtgaccaggcttgatccggctattaacgtgagtgattcgggtgcgccggaggatcttgatccggtatgtgcggtgtcgttgcgtcacaccattcgggatgtggggtcggtgcagagcatgccggtgtcggttcagttgcaggcgtttcgattcattgggctcaacggtgcgggcgcacatgatctggcgcgggcgctggttgtgcagttgttgtaccaccacggaccggaggtggtgggtatcaaagcgatcggggagtcgggttgggagtggctgaaatgggtaccgcacacccgcgatccggagaaggcagcctttcggattttgctggtggattccgtgttgaccaacggcaccgaaagcttcattgatgacccccaatggaccacgatcatcaacgttggcgcgcagaccagcaccgcattgggccagctggcagaggatgaagggctgctgttgcacgtcgataagcgtctgcatgtggctaccgcgcacggcgcggaggagctgggcacgccggatgcggttagcgctgagcttgcggaggtttttggccgccgtttgactgcttttcgacgcacaaccacagcacacgcggcgagctctggtgaattgctgtcccttttggggattgatgacgtggagcatttaactccagaaaccttatggatgaacaagcgcacgcagcctaaaactcgtttggcggtgcccttgggtttgaacgcgtccggtcggccgatggtactggatctgaaggaatcggcgcacggcggaatgggaccacatgggctgtgcatcggcgctactggcagcggaaaatccgaacttttaagaacacttgttctaggtttgacgatcacccattcgcctgaggaattgaatctggtgttggtggattttaaaggtggcgccacctttttgggcttcgagcagctgcctcacacgtccgcggtgatcaccaacttggaggaagagcccgtgctggtggagcgcatgcatgatgcgatttcgggtgagatgaaccgcaggcaagaagcccttcggcaggcaggtggctgcgccaatgtggatgaatacaaccagcgtgatggtgtgaaaccgatgcccgcgctgctcattgagagcgatgaattctcggagttgcttggccaacatcccgatttcgcagacctattcgtcgccgtcggacgcttgggccgttccttacacatccatttgttgctcgctagccaacgtctggaagaggggcggttgcgcggattggattcccacttgtcctaccggatcggcttaaaaaccttttccgcatccgaatcgcgccaggtattaggcatcactgacgcatatcaattacccagccaacccggcgcaggtttcctcaaatccgacgtcgacaccgtcacccgcttccaagcaagttatgtatccggccccatcatgcgtcgccatcacctcgcaccaacgcagtcccgggtgcgcctttttaccagctgggaggaacccaaagaggaggtgattgtcgagcaaagcaccgagacgcttatcgacgccgtggttgcgcgcgccatcagcgccgcgaagttgcgggggttaagcgctcatcgcatctggttgccaccgttgccggcagaagtttcgattggtgctttggctgatgatgtcggtgagctaagcgccgtgatcgggatgatcgatagaccctatcaacagcgacaagatccattgctgattgatttttctctcaccggtggaagcggccactgggctatttgtggtgggccccaaaccggaaagtccacggcattgcgcagcatcgtgatctccatggcagcaacgcatagcacagaaaacatccgcttttacgtgctggatttatctggaacctccctggaaaatctctcccggctgcctcatgttgcaggcgtggcaggacgcaaagatccagagaaagtccgccgagttgtcgatgaagtacgaggcctgatcaaccaccctgaacaacgccacaccttccttattgtggacggctggcacaccatcacccaagaattcgacgagcttttcgacgccttcgtagacatcgccgccaacggccttgcctcgcgggtgcatttagttttaagcactcaacgctggagttccatccgccccgcggtccgcgatctggtgactggcagaatcgaattgaaactcggcgaagccatggattcggtgattgatcgtaaagctcagcttcggatcccgtcgaaacctgggcgtggcctcaacctggataaagaacacatccttattgctcatgcgtctggccaagacatcgcccaggtatgcgtcatggccgatgggcaaggatggcagcaggtcccacaattaagcgtgctgcctgcgcatatcctgcttcacgagcttgagctttctgcgacacctggcatcccgattgcacggggaggtgctgaactatccacgctgacgtgggatccagaatccagccgccaccttctagcttttggttctcaaggttgtggcaaatcctcgctgatccgcacgattgtcacgggtctgacaattgtggggcgggagaaagcacgcttggtatttttcgaccttcgacgcacccacctaggcctggtccccgaagacatgttggctgcttattgtgctacttccacagcagtccacaacaccatcaaagacatggtggctacgctatccgccagacttccaggacctgatatcaccgcccaagaactccgcgatcgttcctggtggcaggggcccgacatttatttagttatcgatgattatgatttgctccccgccggcaccctgcacccgctgcgcgagatcatcccgcatgcaagagacgtaggcctgcacatcgtgctcacccgcaaagccggtggcgcctcgcgtgcgctctacgatccggtcatgtccgagatcaaggaccaatcaccgcacgtcgtgcttttcgacgccgaccgcgacgaaggcgctatcctaggcatcaaacccacagcacaaccaccaggacgtgccacgatgtccatccgtggtgaaaacatcggtgttgcacagatggcaccgcataggtgatgactcatgagcacccaaac

SEQ ID NO: 114 - protein, 1106 aa, Corynebacterium glutamicum
MFAPPEGDDTDEVRRTYLRHLGALRAKATDHAAMQRRHEWHRHPDPATLWSTLGTRRMWERTQDDQDCLEIRFGLGVTRLDPAINVSDSGAPEDLDPVCAVSLRHTIRDVGSVQSMPVSVQLQAFRFIGLNGAGAHDLARALVVQLLYHHGPEVVGIKAIGESGWEWLKWVPHTRDPEKAAFRILLVDSVLTNGTESFIDDPQWTTIINVGAQTSTALGQLAEDEGLLLHVDKRLHVATAHGAEELGTPDAVSAELAEVFGRRLTAFRRTTTAHAASSGELLSLLGIDDVEHLTPETLWMNKRTQPKTRLAVPLGLNASGRPMVLDLKESAHGGMGPHGLCIGATGSGKSELLRTLVLGLTITHSPEELNLVLVDFKGGATFLGFEQLPHTSAVITNLEEEPVLVERMHDAISGEMNRRQEALRQAGGCANVDEYNQRDGVKPMPALLIESDEFSELLGQHPDFADLFVAVGRLGRSLHIHLLLASQRLEEGRLRGLDSHLSYRIGLKTFSASESRQVLGITDAYQLPSQPGAGFLKSDVDTVTRFQASYVSGPIMRRHHLAPTQSRVRLFTSWEEPKEEVIVEQSTETLIDAVVARAISAAKLRGLSAHRIWLPPLPAEVSIGALADDVGELSAVIGMIDRPYQQRQDPLLIDFSLTGGSGHWAICGGPQTGKSTALRSIVISMAATHSTENIRFYVLDLSGTSLENLSRLPHVAGVAGRKDPEKVRRVVDEVRGLINHPEQRHTFLIVDGWHTITQEFDELFDAFVDIAANGLASRVHLVLSTQRWSSIRPAVRDLVTGRIELKLGEAMDSVIDRKAQLRIPSKPGRGLNLDKEHILIAHASGQDIAQVCVMADGQGWQQVPQLSVLPAHILLHELELSATPGIPIARGGAELSTLTWDPESSRHLLAFGSQGCGKSSLIRTIVTGLTIVGREKARLVFFDLRRTHLGLVPEDMLAAYCATSTAVHNTIKDMVATLSARLPGPDITAQELRDRSWWQGPDIYLVIDDYDLLPAGTLHPLREIIPHARDVGLHIVLTRKAGGASRALYDPVMSEIKDQSPHVVLFDADRDEGAILGIKPTAQPPGRATMSIRGENIGVAQMAPHR

SEQ ID NO: 115 - DNA, 1446 bp, Corynebacterium glutamicum
  CDS (101)..(1423): RXA01829
tgcaacggctggctgctcaagctttgccagtgtgcgtgaacttagaagtaacaaccggtggcgatagaaacgaacccggagtcaattgtagggaggtctcatgaacacgcttgaacgattaaagcttcgtcgcacggaaatgtggctgctgatacttgccacactcgttgtgtcgatcatgttcatcagcctcgagctggccatgggcaatgagttgggtacccatattttgatgctgatgggcggatatatcggtatcttcatcgtcgcgcacctagccatggcatgggtggcgccgtttgctgatcaaatcatgctgcctgtggtggcggtgctcaatggcattggtttggtgatgatttatcgccttgatgaggccacgggctacagcacggtcaatagccaattgatgtggacggttgttggcgtcacgctgatggtggctgtgttgttgctgttgcgtgattacaagtcgctttcgcgttattcctacctcctcggtgtggtgggcatcgtgctgctggcgctgcctctcgtgtggccgcagccaggcggcgtggaagcccgcatctggatttggcttggacctttctccatccagccaggtgagttctccaagattttgctgctgctgttctttgctcagctgctagccaccaagcgtgctttgtttactgttgcgggctaccgtttcctcggcatggatttccctcgtttgcgtgacctcgcgccgattcttgtggtgtgggcgttggctattttgatcatggctggcgccaacgacttcggtcctgcactgctgcttttcactaccgttttggccatggtgtacctggctaccggccgtggttcctggctgttgattggtgctgtgttggtggctgtcggcgcgttcacggtgtaccaagtttcaagcaagattcaggaacgcgtgcaaaacttcgtggatcctgtggcccactatgacaccaccggttaccagctgtcccagtccttgtttggcatgagttggggcggaatcaccggcaccggcattggtcagggttaccccaacatgatccctgtcgtgcactcggacttcattctcgcagccattggtgaggagcttggtctgattggcctggcggccatcatcgtgctgtttggtgtgtttgtcacccgcggtatgcgcaccgctaccctggctcgtgacagctacggaaagctcgtggcatctggtctgtcgatgaccatcatgatccagattttcgtcgtcgtggcaggtatttcttcactgatgcccatgacaggtttgaccactccgtttatgtcccagggtggttcatccctgatggctaactacattctgatggccatcatcttgcgtatttctgacagtgcccgccgacctgtcatgtccaagcaagcatcggaggtggctgcgtgaaccgctcgattcgaatcaca

SEQ ID NO: 116 - protein, 441 aa, Corynebacterium glutamicum
MNTLERLKLRRTEMWLLILATLVVSIMFISLELAMGNELGTHILMLMGGYIGIFIVAHLAMAWVAPFADQIMLPVVAVLNGIGLVMIYRLDEATGYSTVNSQLMWTVVGVTLMVAVLLLLRDYKSLSRYSYLLGVVGIVLLALPLVWPQPGGVEARIWIWLGPFSIQPGEFSKILLLLFFAQLLATKRALFTVAGYRFLGMDFPRLRDLAPILVVWALAILIMAGANDFGPALLLFTTVLAMVYLATGRGSWLLIGAVLVAVGAFTVYQVSSKIQERVQNFVDPVAHYDTTGYQLSQSLFGMSWGGITGTGIGQGYPNMIPVVHSDFILAAIGEELGLIGLAAIIVLFGVFVTRGMRTATLARDSYGKLVASGLSMTIMIQIFVVVAGISSLMPMTGLTTPFMSQGGSSLMANYILMAIILRISDSARRPVMSKQASEVAA

SEQ ID NO: 117 - DNA, 1044 bp, Corynebacterium glutamicum
  CDS (101)..(1021): RXA01427
cacttcggtggaatgggtacagcgttaagcactaatgtggaatcgatgacgtgtgcatgaagaattcgcatgcacaggaagatagggatggttgacgtcgatggaagacactacttgggaagacacaccaattgctgcggcggcgcgtcgtgcagctcaggtgatgacacccaactccctgacgttgccgaaacctaaagaaccacgcctaattaccatcgccaaccaaaaaggcggcgttggtaaaaccacctccacggtgaatttggctgcgtctttagcaattcatgggcttaaagttctcgtcgtggatttggatccgcagggaaatgcgtcgacagcgttgggtgtcgagcaccgctctggaaccttgtcatcttatgaactactgatcggtgaatgcactgctgatgaagcaatgcagccatccacagctaacgaaaacctcttctgcattccagcaaccctggatcttgctggcgcagaaattgaattggtcagcttggtccgccgcgaataccgtttggcggatgcgttgggccgtgagttcattgacaagcacgattttgattacatgatcattgactgcccaccgtctttgggtctgctcaccattaacgccatgaccgcggtgaatgaagtgctcattccgatccagtgtgagtactacgctctggagggcgtgggccagctactgaacaacatcactatgttgcgtcagcacctgaaccgccagctgcatatttccgcgatcttgctgaccatgtatgacgcccgcaccaacctcgcagaacaggtggccacagaggttaatgatcacttcggtgacgtggtgttgggtaacaagattccacgttcagtgaaggtgtctgaagctcctggctatgggcagactgtcattgaatatgatccaggttccaggggcgccatggcgtatttggatgctgctaaagaattggccactcgtggcgattacttgcctagcgatgaatccggtccgatcggcctaaaacctgcgaaatagcagtaaacttctttgaatac

SEQ ID NO: 118 - protein, 307 aa, Corynebacterium glutamicum
MEDTTWEDTPIAAAARRAAQVMTPNSLTLPKPKEPRLITIANQKGGVGKTTSTVNLAASLAIHGLKVLVVDLDPQGNASTALGVEHRSGTLSSYELLIGECTADEAMQPSTANENLFCIPATLDLAGAEIELVSLVRREYRLADALGREFIDKHDFDYMIIDCPPSLGLLTINAMTAVNEVLIPIQCEYYALEGVGQLLNNITMLRQHLNRQLHISAILLTMYDARTNLAEQVATEVNDHFGDVVLGNKIPRSVKVSEAPGYGQTVIEYDPGSRGAMAYLDAAKELATRGDYLPSDESGPIGLKPAK

SEQ ID NO: 119 - DNA, 754 bp, Corynebacterium glutamicum
  CDS (101)..(754): RXN02973
gtcgagagctgtaaagtcaaggctatatacttctcaagtcgcgccgaaatttgttaaatgactataaaaggcagtcctagtcaaggaagaaggtttgactgtgagtgatgcagggaagaaggactcttccaaggtggagatcggactgaccggtcgacccctgcgcgagttgcctgagccatctcctttggaaaaacatggcccagcaacgatcattgccatggcgaatcaaaaaggtggcgttggtaaaaccacgtccaccatcaacctcggagcatgccttgcagaggcgggacgtaaagtcctgctcgttgacttggatccgcaaggtgcgttgactgctggtttgggaatccactacgacgacgtggatatcaccgtgtatgacctcatggtggacaacaattccaccattgatcaggcgatccaccacactggtcttcctgatctggatgtcgttcctgcaaatattgacttgtccgctgcagaaattcagctggtcaatgaagttggtcgtgaacaaacacttgccagggcgctgcgtcctgtcatgaaggactacgacttcatcatccttgattgtcagccatcacttggtcttttgacggtgaacgctttggcgtgcgcgcacggggttatcatcccgatggagtgcgagaacttatcactgcgcggcctcgcattgctcacagacaccgtggaaaaagttgccgatcggttgaacttcgatctggaaatcctcggcatcttggtc

SEQ ID NO: 120 - protein, 218 aa, Corynebacterium glutamicum
VSDAGKKDSSKVEIGLTGRPLRELPEPSPLEKHGPATIIAMANQKGGVGKTTSTINLGACLAEAGRKVLLVDLDPQGALTAGLGIHYDDVDITVYDLMVDNNSTIDQAIHHTGLPDLDVVPANIDLSAAEIQLVNEVGREQTLARALRPVMKDYDFIILDCQPSLGLLTVNALACAHGVIIPMECENLSLRGLALLTDTVEKVADRLNFDLEILGILV

SEQ ID NO: 121 - DNA, 721 bp, Corynebacterium glutamicum
  CDS (101)..(721): FRXA01603
gtcgagagctgtaaagtcaaggctatatacttctcaagtcgcgccgaaatttgttaaatgactataaaaggcagtcctagtcaaggaagaaggtttgactgtgagtgatgcagggaagaaggactcttccaaggtggagatcggactgaccggtcgacccctgcgcgagttgcctgagccatctcctttggaaaaacatggcccagcaacgatcattgccatggcgaatcaaaaaggtggcgttggtaaaaccacgtccaccatcaacctcggagcatgccttgcagaggcgggacgtaaagtcctgctcgttgacttggatccgcaaggtgcgttgactgctggtttgggaatccactacgacgacgtggatatcaccgtgtatgacctcatggtggacaacaattccaccattgatcaggcgatccaccacactggtcttcctgatctggatgtcgttcctgcaaatattgacttgtccgctgcagaaattcagctggtcaatgaagttggtcgtgaacaaacacttgccagggcgctgcgtcctgtcatgaaggactacgacttcatcatccttgattgtcagccatcacttggtcttttgacggtgaacgctttggcgtgcgcgcacggggttatcatcccgatggagtgcgagtacttctcactgcgtggcctcgcattgctcacagacaccgtggaaaaagttgccgatcggttg

SEQ ID NO: 122 - protein, 207 aa, Corynebacterium glutamicum
VSDAGKKDSSKVEIGLTGRPLRELPEPSPLEKHGPATIIAMANQKGGVGKTTSTINLGACLAEAGRKVLLVDLDPQGALTAGLGIHYDDVDITVYDLMVDNNSTIDQAIHHTGLPDLDVVPANIDLSAAEIQLVNEVGREQTLARALRPVMKDYDFIILDCQPSLGLLTVNALACAHGVIIPMECEYFSLRGLALLTDTVEKVADRL

SEQ ID NO: 123 - DNA, 963 bp, Corynebacterium glutamicum
  CDS (101)..(940): RXN00818
ttcccaatgcgcaaccccagcacgtcacttcaatctcattggtaactttagtttctttctcagtcttggaaagttgccaaaaagcgctaaactatgcggtgtgaagcacccagatcccgcccaaaaagtagagggcaccactgcgaccacccccacaaaggtggctgcttttttcgatctggacaagaccatcatcgccatgagttccacctacgcctacggccgtgagttcatgaacagcgggctcatctcccctgtcgaagccctgcaattaagcctcgcgcaagcaacgtacatgttcgccggccacaccagtgaacaaatggacaacacccgcgaccaactcaccgccatgatccgcggctgggaagtccaacaggtgcgctcgatcgcggaggaaaccatgcattcggtggtcactcccaccatctacgcagaggcccgcgaactgatcgagcaccaccaggagctcggccacgatgtcatcatcatttccgcctctgtgaaagaactggtggaacccatcgcccgcgaactgggtgtacataaaactgtcaccaccgtgcttgaagcccacgacggtatgtacaccggtgaagtgctgttttactgcaaaggcgacgctaaagcgcagtccatcctggatctcgccgaggcgaacaattacgacctttccttaagcttcgcctactccgattccttcacggacctgcccatgttggaagctgtcggcaacccggccgccgtcaaccccgaccgcgcgctgaagaaaatcgcccttgaacaggggtggaaaatcttaagcttcaaaaaccctgaaccgctgttccaaatgcccagcacccgcgacgtcggcatcggaaccggagttgttgccggcatcgcagctgttacagcaggtagtatctggtggatgaaacgcgcacggcgcggatcggcctgagcctcacctgacagcagtta

SEQ ID NO: 124 - protein, 280 aa, Corynebacterium glutamicum
VKHPDPAQKVEGTTATTPTKVAAFFDLDKTIIAMSSTYAYGREFMNSGLISPVEALQLSLAQATYMFAGHTSEQMDNTRDQLTAMIRGWEVQQVRSIAEETMHSVVTPTIYAEARELIEHHQELGHDVIIISASVKELVEPIARELGVHKTVTTVLEAHDGMYTGEVLFYCKGDAKAQSILDLAEANNYDLSLSFAYSDSFTDLPMLEAVGNPAAVNPDRALKKIALEQGWKILSFKNPEPLFQMPSTRDVGIGTGVVAGIAAVTAGSIWWMKRARRGSA

SEQ ID NO: 125 - DNA, 2898 bp, Corynebacterium glutamicum
  CDS (101)..(2875): RXN03028
ctaattccaagccgagctgaaaaagtctggaagttttgcccaataagggcgttaaagtgggtgaaagcgaatttagaaataaagaattaaggggagagacatgttcgagaggtttaccgatcgtgcacgccgcgtgattgtgctcgcgcaggaagaggcgcgcatgctcaaccacaattacatcggcacggagcacattctcctcggcctcattcacgagggcgagggcgttgcagccaaggctttggaatccatgggaatttccctggacgccgtccgccaggaagtcgaagagattatcggccagggctcccagcccaccaccggccacattccttttactccacgtgccaagaaggtcctggagctcagcctccgcgaaggcctacaaatgggacacaagtacatcggtactgagttcctgcttctcggtttgatccgtgagggcgagggcgttgctgcccaggtcctggtcaagcttggtgctgatctgccacgcgtgcgtcagcaagttattcagcttctctccggctacgaaggtggccagggcggatccccagagggcggccagggcgcccctactggcggtgacgctgttggtgcaggagctgctcctggcggtcgtccatcttcgggcagcccaggcgagcgttctacctctttggtccttgaccagttcggccgcaacctcacccaggctgcaaaggacggcaagctggatccagttgttggtcgcgataaggaaatcgagcgcatcatgcaggtgctctcccgtcgtaccaagaacaacccagttcttattggtgagccaggtgttggtaagaccgcagttgttgaaggtcttgcactagacattgttaacggcaaggttccagagaccctcaaggacaagcaggtttactcccttgacttaggttccctggttgcaggttcccgttaccgcggtgacttcgaagagcgactgaagaaggtcctcaaggagattaaccagcgcggcgacatcatcctgtttatcgatgagatccacaccctcgtgggtgcaggtgcagcagaaggcgcaatcgacgctgcctccctgcttaagccaaagcttgcccgcggtgaactgcagaccattggtgcaaccaccctggatgagtaccgtaagcacattgaaaaggacgcagctcttgagcgtcgtttccagccagtgcaggttccagagccttcggttgatctcaccgttgagatcttgaagggtctgcgcgaccgctacgaagctcaccaccgcgtatccatcaccgatggtgctcttactgcagcagctcagcttgctgatcgctacatcaacgaccgcttcttgccagataaggccgttgacctcatcgatgaggctggcgcccgcatgcgcatcaagcgcatgaccgcaccttcctccctccgcgaggttgatgagcgtatcgctgatgttcgccgtgagaaggaagcagcgatcgatgctcaggactttgagaaggcagcaggtcttcgcgataaggagcgcaagctcggcgaagagcgttcagagaaggaaaagcagtggcgctccggcgacctcgaggacatcgctgaggttggcgaagagcagatcgcagaagtactggccaactggactggtattcctgtcttcaagctcaccgaagctgaatcttcacgcctgctcaacatggaagaagagttgcacaagcgcatcatcggacaggatgaagctgtcaaggctgtctcccgtgcgatccgtcgtacccgtgcaggtctgaaggatcctaagcgtccttccggctccttcatcttcgctggtccatccggcgttggtaagaccgagctgtccaaggctctcgcaggattcctcttcggtgacgatgattccctcatccaaatcgacatgggtgagttccacgaccgcttcaccgcgtcccgacttttcggtgcccctccgggatacgttggctacgaagaaggtggccagctgaccgagaaggttcgccgtaagccattctccgttgtgcttttcgacgaaatcgagaaggcccacaaggagatctacaacaccttgctgcaggtgttggaagatggtcgccttaccgatggtcagggacgcatcgtggacttcaagaacaccgtcctgatcttcacctccaacctgggcaccgctgacatctccaaggctgttggcctgggcttctccggatcctccgagactgacagcgatgctcagtacgaccgcatgaagaacaaggtccacgacgagctgaagaagcacttccgccctgagttcctgaaccgtattgatgagatcgtggtcttccaccagctcaccaaggatcagatcgttcagatggtcgaccttcttatcggtcgcgtttccaacgcactggctgagaaggacatgagcatcgaactgactgagaaggccaaggacctcctggctaaccgaggcttcgatccagttctgggtgcacgaccattgcgtcgcaccatccagcgcgaaattgaagaccagatgtccgagaagatcctcttcggtgaaatcggcgcaggcgagatcgtcaccgttgacgtcgaaggctgggacggcgagtccaaggacaccgaccgtgcgaagttcaccttcacaccacgtccaaagccaatgccagaaggtaagttctctgagatctctgtcgaggctgcggaagcaattcaagatgtagattctgcagctgacggcgatgtcccagaaaccgattcactttccgacattgaccttgaaacccttgaaaagtttgaggaagatgtagaaaacggcaccgacattgatcaggtgtccggtgactactacggcaccgatgatcagggaggcactgctccaagcaaggagtagcaaccttttgaaaaagggcc

SEQ ID NO: 126 - protein, 925 aa, Corynebacterium glutamicum
MFERFTDRARRVIVLAQEEARMLNHNYIGTEHILLGLIHEGEGVAAKALESMGISLDAVRQEVEEIIGQGSQPTTGHIPFTPRAKKVLELSLREGLQMGHKYIGTEFLLLGLIREGEGVAAQVLVKLGADLPRVRQQVIQLLSGYEGGQGGSPEGGQGAPTGGDAVGAGAAPGGRPSSGSPGERSTSLVLDQFGRNLTQAAKDGKLDPVVGRDKEIERIMQVLSRRTKNNPVLIGEPGVGKTAVVEGLALDIVNGKVPETLKDKQVYSLDLGSLVAGSRYRGDFEERLKKVLKEINQRGDIILFIDEIHTLVGAGAAEGAIDAASLLKPKLARGELQTIGATTLDEYRKHIEKDAALERRFQPVQVPEPSVDLTVEILKGLRDRYEAHHRVSITDGALTAAAQLADRYINDRFLPDKAVDLIDEAGARMRIKRMTAPSSLREVDERIADVRREKEAAIDAQDFEKAAGLRDKERKLGEERSEKEKQWRSGDLEDIAEVGEEQIAEVLANWTGIPVFKLTEAESSRLLNMEEELHKRIIGQDEAVKAVSRAIRRTRAGLKDPKRPSGSFIFAGPSGVGKTELSKALAGFLFGDDDSLIQIDMGEFHDRFTASRLFGAPPGYVGYEEGGQLTEKVRRKPFSVVLFDEIEKAHKEIYNTLLQVLEDGRLTDGQGRIVDFKNTVLIFTSNLGTADISKAVGLGFSGSSETDSDAQYDRMKNKVHDELKKHFRPEFLNRIDEIVVFHQLTKDQIVQMVDLLIGRVSNALAEKDMSIELTEKAKDLLANRGFDPVLGARPLRRTIQREIEDQMSEKILFGEIGAGEIVTVDVEGWDGESKDTDRAKFTFTPRPKPMPEGKFSEISVEAAEAIQDVDSAADGDVPETDSLSDIDLETLEKFEEDVENGTDIDQVSGDYYGTDDQGGTAPSKE

SEQ ID NO: 127 - DNA, 1104 bp, Corynebacterium glutamicum
  CDS (101)..(1081): FRXA02470
ctaattccaagccgagctgaaaaagtctggaagttttgcccaataagggcgttaaagtgggtgaaagcgaatttagaaataaagaattaaggggagagacatgttcgagaggtttaccgatcgtgcacgccgcgtgattgtgctcgcgcaggaagaggcgcgcatgctcaaccacaattacatcggcacggagcacattctcctcggcctcattcacgagggcgagggcgttgcagccaaggctttggaatccatgggaatttccctggacgccgtccgccaggaagtcgaagagattatcggccagggctcccagcccaccaccggccacattccttttactccacgtgccaagaaggtcctggagctcagcctccgcgaaggcctacaaatgggacacaagtacatcggtactgagttcctgcttctcggtttgatccgtgagggcgagggcgttgctgcccaggtcctggtcaagcttggtgctgatctgccacgcgtgcgtcagcaagttattcagcttctctccggctacgaaggtggccagggcggatccccagagggcggccagggcgcccctactggcggtgacgctgttggtgcaggagctgctcctggcggtcgtccatcttcgggcagcccaggcgagcgttctacctctttggtccttgaccagttcggccgcaacctcacccaggctgcaaaggacggcaagctggatccagttgttggtcgcgataaggaaatcgagcgcatcatgcaggtgctctcccgtcgtaccaagaacaacccagttcttattggtgagccaggtgttggtaagaccgcagttgttgaaggtcttgcactagacattgttaacggcaaggttccagagaccctcaaggacaagcaggtttactcccttgacttaggttccctggttgcaggttcccgttaccgcggtgacttcgaagagcgactgaagaaggtcctcaaggagattaaccagcgcggcgacatcatcctgtttatcgatgagatccacaccctcgtgggtgcaggtgcagcacgaaggcgcaatcgacgctgcctccctgcttaagccaaagcttgcccgcggtg

SEQ ID NO: 128 - protein, 327 aa, Corynebacterium glutamicum
MFERFTDRARRVIVLAQEEARMLNHNYIGTEHILLGLIHEGEGVAAKALESMGISLDAVRQEVEEIIGQGSQPTTGHIPFTPRAKKVLELSLREGLQMGHKYIGTEFLLLGLIREGEGVAAQVLVKLGADLPRVRQQVIQLLSGYEGGQGGSPEGGQGAPTGGDAVGAGAAPGGRPSSGSPGERSTSLVLDQFGRNLTQAAKDGKLDPVVGRDKEIERIMQVLSRRTKNNPVLIGEPGVGKTAVVEGLALDIVNGKVPETLKDKQVYSLDLGSLVAGSRYRGDFEERLKKVLKEINQRGDIILFIDEIHTLVGAGAARRRNRRCLPA

SEQ ID NO: 129 - DNA, 1956 bp, Corynebacterium glutamicum
  CDS (101)..(1933): FRXA02471
ggtgacttcgaagagcgactgaagaaggtcctcaaggagattaaccagcgcggcgacatcatcctgtttatcgatgagatccacaccctcgtgggtgcaggtgcagcacgaaggcgcaatcgacgctgcctccctgcttaagccaaagcttgcccgcggtgaactgcagaccattggtgcaaccaccctggatgagtaccgtaagcacattgaaaaggacgcagctcttgagcgtcgtttccagccagtgcaggttccagagccttcggttgatctcaccgttgagatcttgaagggtctgcgcgaccgctacgaagctcaccaccgcgtatccatcaccgatggtgctcttactgcagcagctcagcttgctgatcgctacatcaacgaccgcttcttgccagataaggccgttgacctcatcgatgaggctggcgcccgcatgcgcatcaagcgcatgaccgcaccttcctccctccgcgaggttgatgagcgtatcgctgatgttcgccgtgagaaggaagcagcgatcgatgctcaggactttgagaaggcagcaggtcttcgcgataaggagcgcaagctcggcgaagagcgttcagagaaggaaaagcagtggcgctccggcgacctcgaggacatcgctgaggttggcgaagagcagatcgcagaagtactggccaactggactggtattcctgtcttcaagctcaccgaagctgaatcttcacgcctgctcaacatggaagaagagttgcacaagcgcatcatcggacaggatgaagctgtcaaggctgtctcccgtgcgatccgtcgtacccgtgcaggtctgaaggatcctaagcgtccttccggctccttcatcttcgctggtccatccggcgttggtaagaccgagctgtccaaggctctcgcaggattcctcttcggtgacgatgattccctcatccaaatcgacatgggtgagttccacgaccgcttcaccgcgtcccgacttttcggtgcccctccgggatacgttggctacgaagaaggtggccagctgaccgagaaggttcgccgtaagccattctccgttgtgcttttcgacgaaatcgagaaggcccacaaggagatctacaacaccttgctgcaggtgttggaagatggtcgccttaccgatggtcagggacgcatcgtggacttcaagaacaccgtcctgatcttcacctccaacctgggcaccgctgacatctccaaggctgttggcctgggcttctccggatcctccgagactgacagcgatgctcagtacgaccgcatgaagaacaaggtccacgacgagctgaagaagcacttccgccctgagttcctgaaccgtattgatgagatcgtggtcttccaccagctcaccaaggatcagatcgttcagatggtcgaccttcttatcggtcgcgtttccaacgcactggctgagaaggacatgagcatcgaactgactgagaaggccaaggacctcctggctaaccgaggcttcgatccagttctgggtgcacgaccattgcgtcgcaccatccagcgcgaaattgaagaccagatgtccgagaagatcctcttcggtgaaatcggcgcaggcgagatcgtcaccgttgacgtcgaaggctgggacggcgagtccaaggacaccgaccgtgcgaagttcaccttcacaccacgtccaaagccaatgccagaaggtaagttctctgagatctctgtcgaggctgcggaagcaattcaagatgtagattctgcagctgacggcgatgtcccagaaaccgattcactttccgacattgaccttgaaacccttgaaaagtttgaggaagatgtagaaaacggcaccgacattgatcaggtgtccggtgactactacggcaccgatgatcagggaggcactgctccaagcaaggagtagcaaccttttgaaaaagggcc

SEQ ID NO: 130 - protein, 611 aa, Corynebacterium glutamicum
VQHEGAIDAASLLKPKLARGELQTIGATTLDEYRKHIEKDAALERRFQPVQVPEPSVDLTVEILKGLRDRYEAHHRVSITDGALTAAAQLADRYINDRFLPDKAVDLIDEAGARMRIKRMTAPSSLREVDERIADVRREKEAAIDAQDFEKAAGLRDKERKLGEERSEKEKQWRSGDLEDIAEVGEEQIAEVLANWTGIPVFKLTEAESSRLLNMEEELHKRIIGQDEAVKAVSRAIRRTRAGLKDPKRPSGSFIFAGPSGVGKTELSKALAGFLFGDDDSLIQIDMGEFHDRFTASRLFGAPPGYVGYEEGGQLTEKVRRKPFSVVLFDEIEKAHKEIYNTLLQVLEDGRLTDGQGRIVDFKNTVLIFTSNLGTADISKAVGLGFSGSSETDSDAQYDRMKNKVHDELKKHFRPEFLNRIDEIVVFHQLTKDQIVQMVDLLIGRVSNALAEKDMSIELTEKAKDLLANRGFDPVLGARPLRRTIQREIEDQMSEKILFGEIGAGEIVTVDVEGWDGESKDTDRAKFTFTPRPKPMPEGKFSEISVEAAEAIQDVDSAADGDVPETDSLSDIDLETLEKFEEDVENGTDIDQVSGDYYGTDDQGGTAPSKE

SEQ ID NO: 131 - DNA, 1875 bp, Corynebacterium glutamicum
  CDS (101)..(1852): RXN03094
atagatattagagagttaaataatggcgcttgacctgcaggaaattgagatcaacactgattgtgtaggttggcgcccaacaaagaaagggcgttgaaagatgagttcattcaatccaactaccaaaaccaatgaagccatgcaggctgctcttcagcaggcatcctcggctggcaaccctgatattcgtccagctcacctgttggctgccatcttggagcaaactgatggcgtagcagcgccagtcctcatggctactggtgtggatcctaaggagatcctcgcagaggccaagaagttggttgcttcttaccccaaggcttctggcgccaatatggctaatccaaacttcaaccgggatgccctcaatgcgttcactgcagctcaggagcttgccggtgagttgggcgatgagtacgtctcaaccgaagtacttcttgccggtatcgctcgcggaaagtctgatgctgcggatctgttgaccaacaagggtgcaacctatgacgccatcaaagaggctttcccttcggttcgtggatctcagcgtgtcaccactcaggatccagagggacagttccaggctttggaaaagtactccactgacctgaccaagcttgctcgtgaaggcaagattgatcctgttattggccgtgaccaggaaattcgtcgcgtcgttcaggtgcttagccgtcgtaccaagaacaaccctgttctgatcggtgagccaggtgtcggtaaaaccgccatcgtggaaggccttgcacgccgcatcgttgctggtgacgttccagaatccctcaagggcaaaactctgatcagtcttgatcttggttccatggttgccggcgctaagtatcgcggtgaattcgaggagcgactgaaggctgttctggatgagatcaagggagctaacggcgaagtcgttaccttcatcgatgagctgcacaccatcgtcggcgctggtgcttcgggtgaatccgccatggatgccggaaacatgattaagccactgcttgcccgcggtgagctgcgcttggttggtgccaccacgctgaatgagtaccgcaagtacatcgaaaaggacgctgccctggagcgtaggttccagcaggtttatgtcggtgagccaacggtagaagatgccatcggtattcttcgtggattgaaggaacgctacgaggtccatcacggtgtccgcatccaggactccgcactggtcgccgcagctgaactctcaaaccgctatatcaccagccgtttccttcctgataaggctattgacttagttgatgaggcagcatcacgcctgcgcatggagattgattcttcacctcaggaaatcgatgagctggagcgtatcgtccgccgcctcgagatcgaagagatggcgctgtccaaggaatccgatgcagcttccaaggaacgtctagaaaagctgcgctcggaacttgctgatgaacgcgaaaagctctctgagttgaaggctcgttggcagaatgagaaaactgctattgacgatgtccgggagatgaaagaagagctggaagcgctgcgttctgagtcggatattgcaaaacgtgacggcaattattgtcgtgtcgcaaagcttcgctacggccgaatccctgagctggaaaagcagatcgaggatgcagaatccaaggtcgaggtcaatgaaaatgccatgctcactgaggaggtcacgccagacacgatcgccgatgtggtttccgcatggacgggcattcctgcaggcaagatgatgcagggtgagaccgagaagctgctcaacatggagcgcgtcttgggcaaccgtgtggtcggtcagctagaaagcggtaactgcagtgtctgacgcggtgcgtcgttcacgcg

SEQ ID NO: 132 - protein, 584 aa, Corynebacterium glutamicum
MSSFNPTTKTNEAMQAALQQASSAGNPDIRPAHLLAAILEQTDGVAAPVLMATGVDPKEILAEAKKLVASYPKASGANMANPNFNRDALNAFTAAQELAGELGDEYVSTEVLLAGIARGKSDAADLLTNKGATYDAIKEAFPSVRGSQRVTTQDPEGQFQALEKYSTDLTKLAREGKIDPVIGRDQEIRRVVQVLSRRTKNNPVLIGEPGVGKTAIVEGLARRIVAGDVPESLKGKTLISLDLGSMVAGAKYRGEFEERLKAVLDEIKGANGEVVTFIDELHTIVGAGASGESAMDAGNMIKPLLARGELRLVGATTLNEYRKYIEKDAALERRFQQVYVGEPTVEDAIGILRGLKERYEVHHGVRIQDSALVAAAELSNRYITSRFLPDKAIDLVDEAASRLRMEIDSSPQEIDELERIVRRLEIEEMALSKESDAASKERLEKLRSELADEREKLSELKARWQNEKTAIDDVREMKEELEALRSESDIAKRDGNYCRVAKLRYGRIPELEKQIEDAESKVEVNENAMLTEEVTPDTIADVVSAWTGIPAGKMMQGETEKLLNMERVLGNRVVGQLESGNCSV

SEQ ID NO: 133 - DNA, 1816 bp, Corynebacterium glutamicum
  CDS (101)..(1816): FRXA01668
atagatattagagagttaaataatggcgcttgacctgcaggaaattgagatcaacactgattgtgtaggttggcgcccaacaaagaaagggcgttgaaagatgagttcattcaatccaactaccaaaaccaatgaagccatgcaggctgctcttcagcaggcatcctcggctggcaaccctgatattcgtccagctcacctgttggctgccatcttggagcaaactgatggcgtagcagcgccagtcctcatggctactggtgtggatcctaaggagatcctcgcagaggccaagaagttggttgcttcttaccccaaggcttctggcgccaatatggctaatccaaacttcaaccgggatgccctcaatgcgttcactgcagctcaggagcttgccggtgagttgggcgatgagtacgtctcaaccgaagtacttcttgccggtatcgctcgcggaaagtctgatgctgcggatctgttgaccaacaagggtgcaacctatgacgccatcaaagaggctttcccttcggttcgtggatctcagcgtgtcaccactcaggatccagagggacagttccaggctttggaaaagtactccactgacctgaccaagcttgctcgtgaaggcaagattgatcctgttattggccgtgaccaggaaattcgtcgcgtcgttcaggtgcttagccgtcgtaccaagaacaaccctgttctgatcggtgagccaggtgtcggtaaaaccgccatcgtggaaggccttgcacgccgcatcgttgctggtgacgttccagaatccctcaagggcaaaactctgatcagtcttgatcttggttccatggttgccggcgctaagtatcgcggtgaattcgaggagcgactgaaggctgttctggatgagatcaagggagctaacggcgaagtcgttaccttcatcgatgagctgcacaccatcgtcggcgctggtgcttcgggtgaatccgccatggatgccggaaacatgattaagccactgcttgcccgcggtgagctgcgcttggttggtgccaccacgctgaatgagtaccgcaagtacatcgaaaaggacgctgccctggagcgtaggttccagcaggtttatgtcggtgagccaacggtagaagatgccatcggtattcttcgtggattgaaggaacgctacgaggtccatcacggtgtccgcatccaggactccgcactggtcgccgcagctgaactctcaaaccgctatatcaccagccgtttccttcctgataaggctattgacttagttgatgaggcagcatcacgcctgcgcatggagattgattcttcacctcaggaaatcgatgagctggagcgtatcgtccgccgcctcgagatcgaagagatggcgctgtccaaggaatccgatgcagcttccaaggaacgtctagaaaagctgcgctcggaacttgctgatgaacgcgaaaagctctctgagttgaaggctcgttggcagaatgagaaaactgctattgacgatgtccgggagatgaaagaagagctggaagcgctgcgttctgagtcggatattgcaaaacgtgacggcaattattgtcgtgtcgcaaagcttcgctacggccgaatccctgagctggaaaagcagatcgaggatgcagaatccaaggtcgaggtcaatgaaaatgccatgctcactgaggaggtcacgccagacacgatcgccgatgtggtttccgcatggacgggcattcctgcaggcaagatgatgcagggtgagaccgagaagctgctcaacatggagcgcgtcttgggcaacccg

SEQ ID NO: 134 - protein, 572 aa, Corynebacterium glutamicum
MSSFNPTTKTNEAMQAALQQASSAGNPDIRPAHLLAAILEQTDGVAAPVLMATGVDPKEILAEAKKLVASYPKASGANMANPNFNRDALNAFTAAQELAGELGDEYVSTEVLLAGIARGKSDAADLLTNKGATYDAIKEAFPSVRGSQRVTTQDPEGQFQALEKYSTDLTKLAREGKIDPVIGRDQEIRRVVQVLSRRTKNNPVLIGEPGVGKTAIVEGLARRIVAGDVPESLKGKTLISLDLGSMVAGAKYRGEFEERLKAVLDEIKGANGEVVTFIDELHTIVGAGASGESAMDAGNMIKPLLARGELRLVGATTLNEYRKYIEKDAALERRFQQVYVGEPTVEDAIGILRGLKERYEVHHGVRIQDSALVAAAELSNRYITSRFLPDKAIDLVDEAASRLRMEIDSSPQEIDELERIVRRLEIEEMALSKESDAASKERLEKLRSELADEREKLSELKARWQNEKTAIDDVREMKEELEALRSESDIAKRDGNYCRVAKLRYGRIPELEKQIEDAESKVEVNENAMLTEEVTPDTIADVVSAWTGIPAGKMMQGETEKLLNMERVLGNP

SEQ ID NO: 135 - DNA, 525 bp, Corynebacterium glutamicum
  CDS (101)..(502): RXN02937
gctaccgcgaagaactgtactagttcttccatcagcacccgcagttgtctttgcaagagttcgaaacatccaacgcattggtgacaccggtgttgtcgcggtgatcagcaatggggaaggtccggttgttgcgcttcgtggcgacattgatgcgttgcccatggcggagcgatccggcaaagaatacgcagcaaccggagtgacacaggtggataacaccaccggtcaagaaactccggtggcgcatacctgtggccacgatgtgcatatttcatcactgttgggtgcggtgcaggcgttcaattctcatcgggaattgtggaacggaacgttgatggccgttttccagccagcggaagagacggcagctggtgcgaggatgatggcggatcaggacaacgcgccgggaaatcactctccagcgttcgcgccagatatgcagccaactcttgatcgtggtgtggaagcgctggttgtagctgcttctgcgtggctagtaaaataattggctaatgaatccttttc

SEQ ID NO: 136 - protein, 134 aa, Corynebacterium glutamicum
VISNGEGPVVALRGDIDALPMAERSGKEYAATGVTQVDNTTGQETPVAHTCGHDVHISSLLGAVQAFNSHRELWNGTLMAVFQPAEETAAGARMMADQDNAPGNHSPAFAPDMQPTLDRGVEALVVAASAWLVK

SEQ ID NO: 137 - DNA, 1308 bp, Corynebacterium glutamicum
  CDS (101)..(1285): RXN03077
accccgatcctttgttttcgtgggatcactattagactcgactctaccgcgctgcaggttttcctgatacgcctgcggacaaaacagaaaggtatttcacgtgatggaaattggtgtgcaggttgcctcatggatggaccgccaccatgacgaggtcataaagtggcgcaggcatttgcacagccatcctgagctctcccacatggaataccgcacgactgagtatttggcctcggttctgaaagatcacggcatggaaccacacctgttcccaggaaccggtttgatggtggatatcggaccagaaggggactcccgcctggcgtttcgcgctgatatcgatgcccttccgctgcttgaatcaaccggcttagagttctcttccacagccactggcgttgcgcatgcctgcggacatgacgtgcacacggtgatcgctttggcacttgcctgtgcactgaacaccatcgaactgcccatcggcattcgggtgattttccagccggcagaagaagtcatgactggtggcgcaacggacgtcattgcccacggtggccttgatggtgtggatgcgatttacgccatccacgttgaacccaaattgaaggtcggtcgcgtcggtgtacgcgctggcgcgattacttctgcctcagatgtgatcgaaatcagagtcaagggtgaaggaggacatagcgcacgtccacacctctccgctgatgttgtttacgccttgagcaaattggtcgttgatcttcccggtttgctgtccaggcgcgtcgatccacgcaccggcaccgtgcttgttttcggcaccatcaacgccggctatgcgcccaacgcgatcccagattccggcatcgtgtcaggcaccttgcgtacagccgacatctctacctggcgtgacatgcgtccgcttatctctgagctggtggaacaggtgctcgcacccaccggagtcacccatgaactgatctacaatccgggtgttccaccagtgcttaacgacgatgtcgccaccgctttgttggcaagcgcagcacgcgacatggacacacaatctgttgtccaagcgccgcagtcatccggtggagaagacttctcgtggtaccttgaacacgtcccaggatcaatggcccggttgggttgctggccggggcacggacccaagcaagacctccatcaaagtgacctggttgtggatgagcgagccatcggagttggcgtcaggctctttggctcccttgtgcagcagtacagtagccgatctgaagctttcttaaattcctaatgggggtagtgtgtagggct

SEQ ID NO: 138 - protein, 395 aa, Corynebacterium glutamicum
VMEIGVQVASWMDRHHDEVIKWRRHLHSHPELSHMEYRTTEYLASVLKDHGMEPHLFPGTGLMVDIGPEGDSRLAFRADIDALPLLESTGLEFSSTATGVAHACGHDVHTVIALALACALNTIELPIGIRVIFQPAEEVMTGGATDVIAHGGLDGVDAIYAIHVEPKLKVGRVGVRAGAITSASDVIEIRVKGEGGHSARPHLSADVVYALSKLVVDLPGLLSRRVDPRTGTVLVFGTINAGYAPNAIPDSGIVSGTLRTADISTWRDMRPLISELVEQVLAPTGVTHELIYNPGVPPVLNDDVATALLASAARDMDTQSVVQAPQSSGGEDFSWYLEHVPGSMARLGCWPGHGPKQDLHQSDLVVDERAIGVGVRLFGSLVQQYSSRSEAFLNS

SEQ ID NO: 139 - DNA, 1308 bp, Corynebacterium glutamicum; identical to SEQ ID NO: 137
  CDS (101)..(1285): FRXA02855

SEQ ID NO: 140 - protein, 395 aa, Corynebacterium glutamicum; identical to SEQ ID NO: 138

SEQ ID NO: 141 - DNA, 1629 bp, Corynebacterium glutamicum
  CDS (101)..(1606): RXN00982
gaaaacaaacgtccttgaagccgtaatgccccgttcgacaataaaaagggtagtagcagttcttgccgcctcgactgcgcttagcccctttttggtatcaatgcccactgcagcagcgcaagaaaacatccgctgggaagaatgcccacctcaggtagatattgcctccgctcaatgtggcagcatcgacgtgcccatgcactattctgatccctcacttggcgatatcagcgtgggctttgtcaaggtccctgcccaaggcgaaaagcacggcaccatcttcggtaactccggtggccctggtggcgatgcctatagcttcttcggcagccaatccatgaactggccagaagccatgtaccaaaactacgacctcgttgcagtgcagcctcgcggaatggtcggctccacaccggttaactgcgacaacatcgcaccaggatacgatttcctctcgctgctcacccgcgaaggcgctttcgttaaagaatcctgcgagatcggcacccccggctacacctccagcctgaccaccgacaacaccgccaacgactgggagcgcgtccgccaagcacttggcgatgacaagatctccatcttcggactgtcctacggaacctacctcggatcggtctacgccacccgctacccacagcacaccgacaaggttgtcctcgattccgcaatggcgcccagcctggcatggaacggcatcatggcctcccaagaacagggctacaaaaactccctcaacgacttcttcacctgggttgcagaaaacaacgacacgtatggcctcggcactaccccactagccgtgtaccaaaactggtcaaacaagatcgtcgccgaaaccggaaccaacccaaccgttgctccaccaccagcacaagttggcgatgtcccaccagcattcgcatgggccggccaagcaggcgcagacatgatgaccgccaccaacccaacctccgtgcaactccagggccttgccacccagctcctaaaccctggatccaaccagtcactgagccctctgctcaacgtcacccgcgcctacattccacagccatcaacctggcccatgctcgcaggcgccatctcagggcaaacacccatccctgacgtaactgacaccggcgacgacccatacgtcatcgaaagcatcaacgccagcgtcaacatgcagcgcatggtcatgtgcaacgaaaacaccgtcgcaccagacccagtagcaatggcacgcatggcctggacaagcatggtcaccggcgacgtctttgacatttactccgttaaattcagctccggacaagcctgctccggcatcaccccaacaagcggccgccagccaaccgacggatctcaactagcagtccaaccactactcctccagggaaccagcgacccacaaaccccatactggacccacaacgagcttgccgacgccatgaacgcccacgtggtcaccgtcaacggaccaggacacggccaatccatcggcggcaccaaccaagcaatcaacgacattgttgtggactacctccgcaccggacacaccgacgccacctgggtcgaaggcaacacacccaccccaattacggctggctaattgctttccacttagtagat

SEQ ID NO: 142 - protein, 502 aa, Corynebacterium glutamicum
MPTAAAQENIRWEECPPQVDIASAQCGSIDVPMHYSDPSLGDISVGFVKVPAQGEKHGTIFGNSGGPGGDAYSFFGSQSMNWPEAMYQNYDLVAVQPRGMVGSTPVNCDNIAPGYDFLSLLTREGAFVKESCEIGTPGYTSSLTTDNTANDWERVRQALGDDKISIFGLSYGTYLGSVYATRYPQHTDKVVLDSAMAPSLAWNGIMASQEQGYKNSLNDFFTWVAENNDTYGLGTTPLAVYQNWSNKIVAETGTNPTVAPPPAQVGDVPPAFAWAGQAGADMMTATNPTSVQLQGLATQLLNPGSNQSLSPLLNVTRAYIPQPSTWPMLAGAISGQTPIPDVTDTGDDPYVIESINASVNMQRMVMCNENTVAPDPVAMARMAWTSMVTGDVFDIYSVKFSSGQACSGITPTSGRQPTDGSQLAVQPLLLQGTSDPQTPYWTHNELADAMNAHVVTVNGPGHGQSIGGTNQAINDIVVDYLRTGHTDATWVEGNTPTPITAG

SEQ ID NO: 143 - DNA, 1114 bp, Corynebacterium glutamicum
  CDS (101)..(1114): FRXA00977
gaaaacaaacgtccttgaagccgtaatgccccgttcgacaataaaaagggtagtagcagttcttgccgcctcgactgcgcttagcccctttttggtatcaatgcccactgcagcagcgcaagaaaacatccgctgggaagaatgcccacctcaggtagatattgcctccgctcaatgtggcagcatcgacgtgcccatgcactattctgatccctcacttggcgatatcagcgtgggctttgtcaaggtccctgcccaaggcgaaaagcacggcaccatcttcggtaactccggtggccctggtggcgatgcctatagcttcttcggcagccaatccatgaactggccagaagccatgtaccaaaactacgacctcgttgcagtgcagcctcgcggaatggtcggctccacaccggttaactgcgacaacatcgcaccaggatacgatttcctctcgctgctcacccgcgaaggcgctttcgttaaagaatcctgcgagatcggcacccccggctacacctccagcctgaccaccgacaacaccgccaacgactgggagcgcgtccgccaagcacttggcgatgacaagatctccatcttcggactgtcctacggaacctacctcggatcggtctacgccacccgctacccacagcacaccgacaaggttgtcctcgattccgcaatggcgcccagcctggcatggaacggcatcatggcctcccaagaacagggctacaaaaactccctcaacgacttcttcacctgggttgcagaaaacaacgacacgtatggcctcggcactaccccactagccgtgtaccaaaactggtcaaacaagatcgtcgccgaaaccggaaccaacccaaccgttgctccaccaccagcacaagttggcgatgtcccaccagcattcgcatgggccggccaagcaggcgcagacatgatgaccgccaccaacccaacctccgtgcaactccagggccttgccacccagctcctaaaccctggatccaaccagtcactgagccctctgctcaacgtcacccgcgcctacattccacagccatcaacctggcccatgctcgcaggcgccatctcagggcaaacaccc

SEQ ID NO: 144 - protein, 338 aa, Corynebacterium glutamicum
MPTAAAQENIRWEECPPQVDIASAQCGSIDVPMHYSDPSLGDISVGFVKVPAQGEKHGTIFGNSGGPGGDAYSFFGSQSMNWPEAMYQNYDLVAVQPRGMVGSTPVNCDNIAPGYDFLSLLTREGAFVKESCEIGTPGYTSSLTTDNTANDWERVRQALGDDKISIFGLSYGTYLGSVYATRYPQHTDKVVLDSAMAPSLAWNGIMASQEQGYKNSLNDFFTWVAENNDTYGLGTTPLAVYQNWSNKIVAETGTNPTVAPPPAQVGDVPPAFAWAGQAGADMMTATNPTSVQLQGLATQLLNPGSNQSLSPLLNVTRAYIPQPSTWPMLAGAISGQTP

SEQ ID NO: 145 - DNA, 269 bp, Corynebacterium glutamicum
  CDS (1)..(246): FRXA00982
tctcaactagcagtccaaccactactcctccagggaaccagcgacccacaaaccccatactggacccacaacgagcttgccgacgccatgaacgcccacgtggtcaccgtcaacggaccaggacacggccaatccatcggcggcaccaaccaagcaatcaacgacattgttgtggactacctccgcaccggacacaccgacgccacctgggtcgaaggcaacacacccaccccaattacggctggctaattgctttccacttagtagat

SEQ ID NO: 146 - protein, 82 aa, Corynebacterium glutamicum
SQLAVQPLLLQGTSDPQTPYWTHNELADAMNAHVVTVNGPGHGQSIGGTNQAINDIVVDYLRTGHTDATWVEGNTPTPITAG

SEQ ID NO: 147 - DNA, 980 bp, Corynebacterium glutamicum
  CDS (1)..(957): RXN01181
tctgtactgctcgctcgcgacttggtgaacaccccttcatcacacctgtacccagagtcctactcagtaattgcatccaacgaagcgtccaagcacggcttgcagaccaccatcctggatgagaagcagcttgctgatcaaggtttcggcggcatcctcgcagtcggtaacggctcctcccgcaagcctcgtctgctgcgcatcgattggaagccacgcaaggctaagaagtcgatcgctttggttggcaagggcatcacctttgacaccggcggaatttccatcaagcctggcgcaagcatggagaacatgatctccgacatgggtggatccgcatccgtattggccaccattatcgctgcagctcgtttgaacctgtcgatcaacgtcttcgcgttcctaccaatggctgagaacatgccatccggtgacgctttccgccccggcgatgtcatcactcatttcggtggtatcacctccgaaatcttgaacaccgacgctgaaggccgcctcattctggcagatgccattgcttacgcttctgaagataagcctgactacctcattgatgcggcaaccctgactggtgctcaattagtcgctttaggcctgcggacttcaggtgtcatgggtaccgatgagttccgcgacagcgttgccaagactggccgcgaggttggcgagcaagcatgggcaatgcctcttcctgaagagctcgatgagcaggttaagtcccctgtcgctgacctgcgcaatgtcaccaattcccgtttcgcaggaatgtctgctgcgggtcgttacttgcaggaattcgttggtgccgacatcgagtgggctcacgtcgatatcgctggccctgcatacaacactgctggtgaattcggttacacgccaaagcgcgcaaccggacaaccagtgcgcaccttcgttcaggttctgaaggatctgtcggaaagctaaacgctagttaaagatcagga

SEQ ID NO: 148 - protein, 319 aa, Corynebacterium glutamicum
SVLLARDLVNTPSSHLYPESYSVIASNEASKHGLQTTILDEKQLADQGFGGILAVGNGSSRKPRLLRIDWKPRKAKKSIALVGKGITFDTGGISIKPGASMENMISDMGGSASVLATIIAAARLNLSINVFAFLPMAENMPSGDAFRPGDVITHFGGITSEILNTDAEGRLILADAIAYASEDKPDYLIDAATLTGAQLVALGLRTSGVMGTDEFRDSVAKTGREVGEQAWAMPLPEELDEQVKSPVADLRNVTNSRFAGMSAAGRYLQEFVGADIEWAHVDIAGPAYNTAGEFGYTPKRATGQPVRTFVQVLKDLSES

SEQ ID NO: 149 - DNA, 980 bp, Corynebacterium glutamicum; identical to SEQ ID NO: 147
  CDS (1)..(957): FRXA01181

SEQ ID NO: 150 - protein, 319 aa, Corynebacterium glutamicum; identical to SEQ ID NO: 148

SEQ ID NO: 151 - DNA, 2724 bp, Corynebacterium glutamicum
  CDS (101)..(2701): RXN01014
tcttaaagttttctagcaatccacactaggcgcgaactatcgtggtgtcattgcgcaccttctaagggtagcgccccctcaaatttcaaggagcattaaattgacgtccactaatctcacccgacaggaagcttcggatcgttcgaggttactgagtgtagaaaactatgacattgcacttgatctcaacaacggtgatgagttttttagttcctccaccgttgtcagcttcactgtcaggaaggctggcgatacctttattgatctccgcgcagcaagcgttgaggaggttcgcctggacaatgtgtccatcaaagatgaggctctaacccttggcaagaacggctacgacgagacgttcggcatcgccctgaagggtcttactcccggcgcgcacaccttgcgggtaacggcgtctatcccctattcccgcaccggtgaaggcctgcaccgcatggtggatccagcagacaatgaggtgtatttgtacacccagtttgagaccgccgatgccaagcgtatgttcgcgtgtttcgatcagccagacctcaaggctacctatgatctgaacatcaaaactcctaagggttggaagatcatttccaactctgagcagcaggtttccactcagcacactgattacgatacccacatttcccgagtggactatcccctctccacctacctgattgcggtgtgcgcgggtcgttaccacgaggtgtgcgatgtctggaagggtacgctcacccaccatgcagaaacacctgccgatcagccaactgagctgactgttccgcttgctctctactgccgcagttctttggctaaagatcttgatgcggtgcgtctgtttaccgaaacgaagcagggctttgattggtaccaccgcaacttcggtgtggcgtacccattcggcaagtacgatcagatcttcgtccctgaatttaatgctggcgcgatggagaacgccggcgctgtcaccatccgcgatgagtacgtttttgcatccaaggcaacccgttaccgctacgagcgccgcgctgaaaccatccttcacgagctcgctcacatgtggttcggtgtgctggtgaccatgcagtggtgggatgatctgtggctcaacgagtccttcgccacttggtccgcggcaatttctcaggctgaggaaactgaatacaacactgcatgggtgactttcgccaatgtggagaagtcgtgggcgtaccagcaggatcagctgccttccacccacccggtgttctctgacggatacgacattgagactgtcgaccagaacttcgacggcatcacctacgcaaagggcgcctcggtgctcaagcagctgcaggcatacgttggccgtgaggaattcctggcaggcgtacgcaggcactttgccaaccacgcatggggcaacgccagctttgatgatctgctcggcgccctcgagcagtcctccggccgcgacctctccgactgggcaaaccagtggctcaagaccaccggcatcaacaccctcggcgcaaagttcaccaccgacaacggcaaatacacctccttctccgtcacccagaccggcgccgcgccgggtgccggtgagctgcggactcaccgcatcgcggtgggtctttataagcttgtcgacggatccctcaaccgctacgcacgagtagaacttgactgcagtggcgcgtcgacaagcgttgaagagatcgttggacttgagcaggctgacttcgtgctggtcaacgatgatgatctgacgtatgcgctgctggatctggatgatgattcacgcaattttgtcatcgacaatattgataagttcagcgaccctatgcctcgcacgctggtgtggtccgctgcgtgggagatgactcgcgctggtcagatgaaggctcgtgatttcatcgcgctggttgctcgtggcgctgctgcggaaactgaaattgctgtgctggagcgcattctcgcgcaggctacctctgcgctgaagagctacgccgacccagcgtgggcagaagcaactggaaatgacctgctggccgatgctttccttgagggtgctcgctccgcagaaccagactccgacactcagttggcgttcattcaggctctggcaaaagcaacgctcaatgatgctgctgccgattacttccgcgacattcttgccggcaacgtcgaaggcctgaccgtggatcctgacctgcgttggtgggcactgactgcgcttatcgcccgtggtgacatcgaggctgtcgaagatgcaatcgccgctgaactttcccgcgacaactccagtgcctccttcctcgcatcacttcgagccggtgccgctgtgaacactgaagaagtgaaggctgctgcatacaagcatgtcacggcagttgatagtggcctatccaacctggagctgcgccacaagattgaaggcctcacattcactggctcttctgaactgctgcaagcctacaacgagcagtacttcgaaatccttgatgatgtgtgggcgaacttctccggcgaaatggcacagcagatcgtcctcggactgttcccttcatggaacgtttccgaagagggtctcaagcgtaccgacgagtttcttgatggcgaacatgtcgcaggcatcaagcgaattgtttccgaatccctcgaccgcactgcccgtgctctgcgcaaccgtgcggcagatgctgcgtaagtaaaagattctcaatccca

SEQ ID NO: 152 - protein, 867 aa, Corynebacterium glutamicum
LTSTNLTRQEASDRSRLLSVENYDIALDLNNGDEFFSSSTVVSFTVRKAGDTFIDLRAASVEEVRLDNVSIKDEALTLGKNGYDETFGIALKGLTPGAHTLRVTASIPYSRTGEGLHRMVDPADNEVYLYTQFETADAKRMFACFDQPDLKATYDLNIKTPKGWKIISNSEQQVSTQHTDYDTHISRVDYPLSTYLIAVCAGRYHEVCDVWKGTLTHHAETPADQPTELTVPLALYCRSSLAKDLDAVRLFTETKQGFDWYHRNFGVAYPFGKYDQIFVPEFNAGAMENAGAVTIRDEYVFASKATRYRYERRAETILHELAHMWFGVLVTMQWWDDLWLNESFATWSAAISQAEETEYNTAWVTFANVEKSWAYQQDQLPSTHPVFSDGYDIETVDQNFDGITYAKGASVLKQLQAYVGREEFLAGVRRHFANHAWGNASFDDLLGALEQSSGRDLSDWANQWLKTTGINTLGAKFTTDNGKYTSFSVTQTGAAPGAGELRTHRIAVGLYKLVDGSLNRYARVELDCSGASTSVEEIVGLEQADFVLVNDDDLTYALLDLDDDSRNFVIDNIDKFSDPMPRTLVWSAAWEMTRAGQMKARDFIALVARGAAAETEIAVLERILAQATSALKSYADPAWAEATGNDLLADAFLEGARSAEPDSDTQLAFIQALAKATLNDAAADYFRDILAGNVEGLTVDPDLRWWALTALIARGDIEAVEDAIAAELSRDNSSASFLASLRAGAAVNTEEVKAAAYKHVTAVDSGLSNLELRHKIEGLTFTGSSELLQAYNEQYFEILDDVWANFSGEMAQQIVLGLFPSWNVSEEGLKRTDEFLDGEHVAGIKRIVSESLDRTARALRNRAADAA

SEQ ID NO: 153 - DNA, 1578 bp, Corynebacterium glutamicum
  CDS (1)..(1578): FRXA01014
gatgatctgtggctcaacgagtccttcgccacttggtccgcggcaatttctcaggctgaggaaactgaatacaacactgcatgggtgactttcgccaatgtggagaagtcgtgggcgtaccagcaggatcagctgccttccacccacccggtgttctctgacggatacgacattgagactgtcgaccagaacttcgacggcatcacctacgcaaagggcgcctcggtgctcaagcagctgcaggcatacgttggccgtgaggaattcctggcaggcgtacgcaggcactttgccaaccacgcatggggcaacgccagctttgatgatctgctcggcgccctcgagcagtcctccggccgcgacctctccgactgggcaaaccagtggctcaagaccaccggcatcaacaccctcggcgcaaagttcaccaccgacaacggcaaatacacctccttctccgtcacccagaccggcgccgcgccgggtgccggtgagctgcggactcaccgcatcgcggtgggtctttataagcttgtcgacggatccctcaaccgctacgcacgagtagaacttgactgcagtggcgcgtcgacaagcgttgaagagatcgttggacttgagcaggctgacttcgtgctggtcaacgatgatgatctgacgtatgcgctgctggatctggatgatgattcacgcaattttgtcatcgacaatattgataagttcagcgaccctatgcctcgcacgctggtgtggtccgctgcgtgggagatgactcgcgctggtcagatgaaggctcgtgatttcatcgcgctggttgctcgtggcgctgctgcggaaactgaaattgctgtgctggagcgcattctcgcgcaggctacctctgcgctgaagagctacgccgacccagcgtgggcagaagcaactggaaatgacctgctggccgatgctttccttgagggtgctcgctccgcagaaccagactccgacactcagttggcgttcattcaggctctggcaaaagcaacgctcaatgatgctgctgccgattacttccgcgacattcttgccggcaacgtcgaaggcctgaccgtggatcctgacctgcgttggtgggcactgactgcgcttatcgcccgtggtgacatcgaggctgtcgaagatgcaatcgccgctgaactttcccgcgacaactccagtgcctccttcctcgcatcacttcgagccggtgccgctgtgaacactgaagaagtgaaggctgctgcatacaagcatgtcccggcagttgatagtggcctatccaacctggagctgcgccacaagattgaaggcctcacattcactggctcttttgaactgctgcaagcctacaacgagcagtacttcgaaatccttgatgatgtgtgggcgaacttctccggcgaaatggcacagcagatcgtcctcggactgttcccttcatggaacgtttccgaagagggtctcaagcgtaccgacgagtttcttgatggcgaacatgtcgcaggcatcaagcgaattgtttccgaatccctcgaccgcactgcccgtgctctgcgcaac

SEQ ID NO: 154 - protein, 526 aa, Corynebacterium glutamicum
DDLWLNESFATWSAAISQAEETEYNTAWVTFANVEKSWAYQQDQLPSTHPVFSDGYDIETVDQNFDGITYAKGASVLKQLQAYVGREEFLAGVRRHFANHAWGNASFDDLLGALEQSSGRDLSDWANQWLKTTGINTLGAKFTTDNGKYTSFSVTQTGAAPGAGELRTHRIAVGLYKLVDGSLNRYARVELDCSGASTSVEEIVGLEQADFVLVNDDDLTYALLDLDDDSRNFVIDNIDKFSDPMPRTLVWSAAWEMTRAGQMKARDFIALVARGAAAETEIAVLERILAQATSALKSYADPAWAEATGNDLLADAFLEGARSAEPDSDTQLAFIQALAKATLNDAAADYFRDILAGNVEGLTVDPDLRWWALTALIARGDIEAVEDAIAAELSRDNSSASFLASLRAGAAVNTEEVKAAAYKHVPAVDSGLSNLELRHKIEGLTFTGSFELLQAYNEQYFEILDDVWANFSGEMAQQIVLGLFPSWNVSEEGLKRTDEFLDGEHVAGIKRIVSESLDRTARALRN

SEQ ID NO: 155 - DNA, 964 bp, Corynebacterium glutamicum
  CDS (101)..(964): FRXA01018
tcttaaagttttctagcaatccacactaggcgcgaactatcgtggtgtcattgcgcaccttctaagggtagcgccccctcaaatttcaaggagcattaaattgacgtccactaatctcacccgacaggaagcttcggatcgttcgaggttactgagtgtagaaaactatgacattgcacttgatctcaacaacggtgatgagttttttagttcctccaccgttgtcagcttcactgtcaggaaggctggcgatacctttattgatctccgcgcagcaagcgttgaggaggttcgcctggacaatgtgtccatcaaagatgaggctctaacccttggcaagaacggctacgacgagacgttcggcatcgccctgaagggtcttactcccggcgcgcacaccttgcgggtaacggcgtctatcccctattcccgcaccggtgaaggcctgcaccgcatggtggatccagcagacaatgaggtgtatttgtacacccagtttgagaccgccgatgccaagcgtatgttcgcgtgtttcgatcagccagacctcaaggctacctatgatctgaacatcaaaactcctaagggttggaagatcatttccaactctgagcagcaggtttccactcagcacactgattacgatacccacatttcccgagtggactatcccctctccacctacctgattgcggtgtgcgcgggtcgttaccacgaggtgtgcgatgtctggaagggtacgctcacccaccatgcagaaacacctgccgatcagccaactgagctgactgttccgcttgctctctactgccgcagttctttggctaaagatcttgatgcggtgcgtctgtttaccgaaacgaagcagggctttgattggtaccaccgcaacttcggtgtggcgtacccattcggcaagtacgatcagatcttcgtccctgaatttaatgctggcgcgatggag

SEQ ID NO: 156 - protein, 288 aa, Corynebacterium glutamicum
LTSTNLTRQEASDRSRLLSVENYDIALDLNNGDEFFSSSTVVSFTVRKAGDTFIDLRAASVEEVRLDNVSIKDEALTLGKNGYDETFGIALKGLTPGAHTLRVTASIPYSRTGEGLHRMVDPADNEVYLYTQFETADAKRMFACFDQPDLKATYDLNIKTPKGWKIISNSEQQVSTQHTDYDTHISRVDYPLSTYLIAVCAGRYHEVCDVWKGTLTHHAETPADQPTELTVPLALYCRSSLAKDLDAVRLFTETKQGFDWYHRNFGVAYPFGKYDQIFVPEFNAGAME

SEQ ID NO: 157 - DNA, 1902 bp, Corynebacterium glutamicum
  CDS (101)..(1879): RXN01046
tagcgatcctaggcaaaatgcaccagctaaccccaccgctcaaccgccatctgcccccacctcacactcatcacagcagggtctccctccgggcgccattatgatcccttttccagggcaaccgcagcagcaaagcgcacccaatgacgagacccgtttcatcgaccttaacgaacgtcataaagatgatgaaccagccctgtttcgcgatgatgttattgatcaaactctcgctattttgatcagtaaaaataagcccaatgcgctactcgttgggcctgccggtacaggtaaatcccgtatcgcagaagatattgcgcgccgccttgccaatgatgacgtatctattcccgatcagcttgtcggccaccgtattcttgatgtctccattgcagagcttgttgctggtgctggcgttgttggtcagctcaagaaacgcattctggatctcatcaagtatgcgaccgacccgagtaacaaagtcattatctttattgacgagattcaccaaattgctggtgatcagtccagtcacagtggatcgcaagccaaagttgctcagattctcaaaccctatcttgcccgtggtgaccttcgtgttattggtgccaccaccacccaggaagctcgtgacttcgatcatgatccagccctcaaacgccgttttagcagagtaaatgtcgatgaatttgatcgagatcaaacgctcactattcttcatgctgcacgtgatggttacctcaaacatttcaacaacgctgtcacggtatctgacgacgtactgggctatgtctacacctactcgcagcaattcaacccaggcaatacagcacaacctgatgcagcactgacgctgtttgataaggcgttggcttccctaactatggagaaacagcgtctgatcaacaaccatgtcattgcgccgtcgctcaagttccctgtgtcagaaaggcacatccataacaccgctcgcaaacttgcctttggctctcaagtgccagcctccatcaatactgatgatgctcgtgacaaactcgaaacgttgtttggtcaagatcatattattgagccagtactcaccgctatcaagcgtgaacagcttggtattttccctcgcaccaaaccattgagctgggtgtttgctggttcatctggtgtgggtaaaacagaaatggcgcgtattctctctcgcgccattaatggcggcgatcccatcattatcaatggtcccgaatacattagtcctgagtccattactggccttatcggatcatccgatggctatatcggctctaattctaagcgtgctaaaccactcgacccgctgatttctaatccgcgtcaggtgattgtgctcgatgaatttgagaagtctcaccctcatttccagcaattgttcatggcagctcttgatacaggcactatggcgatggctaatggcacgacattgaatttctctcaggccattatcattgccaccaccaatgcagcccgcgacaaaatcggtcgtgacagctttggattcgattcagataattcaggtgtcctcggttctgctcaagcagcaactgatccgcgtgcacaggaacgcctcaagtcactgatgtccaaggatttcctgttgaactgctcaaccgtttccagaatatctttgccttcaaccgcattgatgcaggcacctaccgtgagattctggacaatctctaccagcgtcgccgtgacgccgtgctgcttagccaccccgcattacgcagcacagatccctgcagatattgattcagacactcttgatcagctggtggaaaccacctttatctcagattttggtgcacgtcctgctgcacgcaccatcgaagaccacatcgcatccttgctgatgtgaccaaccttttaggagtacat

SEQ ID NO: 158 - protein, 593 aa, Corynebacterium glutamicum
MIPFPGQPQQQSAPNDETRFIDLNERHKDDEPALFRDDVIDQTLAILISKNKPNALLVGPAGTGKSRIAEDIARRLANDDVSIPDQLVGHRILDVSIAELVAGAGVVGQLKKRILDLIKYATDPSNKVIIFIDEIHQIAGDQSSHSGSQAKVAQILKPYLARGDLRVIGATTTQEARDFDHDPALKRRFSRVNVDEFDRDQTLTILHAARDGYLKHFNNAVTVSDDVLGYVYTYSQQFNPGNTAQPDAALTLFDKALASLTMEKQRLINNHVIAPSLKFPVSERHIHNTARKLAFGSQVPASINTDDARDKLETLFGQDHIIEPVLTAIKREQLGIFPRTKPLSWVFAGSSGVGKTEMARILSRAINGGDPIIINGPEYISPESITGLIGSSDGYIGSNSKRAKPLDPLISNPRQVIVLDEFEKSHPHFQQLFMAALDTGTMAMANGTTLNFSQAIIIATTNAARDKIGRDSFGFDSDNSGVLGSAQAATDPRAQERLKSLMSKDFLLNCSTVSRISLPSTALMQAPTVRFWTISTSVAVTPCCLATPHYAAQIPADIDSDTLDQLVETTFISDFGARPAARTIEDHIASLLM

SEQ ID NO: 159 - DNA, 1908 bp, Corynebacterium glutamicum
  CDS (101)..(1885): RXN01974
acaatatttacggggataatctgcattaacaaattagttaataaagtgtagtatttaattaattattaaattcaattaacttttttgtaaaggtgggaagatgacccaggttgtggcgggtacgttggtgggagagtcgattaatcgtgagattgatgaagacaagtacccttatttgagctcgtatgcagcgcctgttgctgtaccggtgcgtgagattattgggcgcgaagaagaagtcaataagattatggccgcgctgatgcgtccagagatttctaatgtcatgcttgtgggtcctgctggttcgggtaaaactacgttggtacagcaagcactggtgaaagatccagagcgtaactacatcgaggtcgatgtagcgaaaatggttgcggatttgagcaccccggcgcaaatggctgcgcgtattaaaggtgtgtttgaggacgccattgcctatcgcaagcacgaaggtcatgaattggtgctgttcgttgatgagtttcaccaaattgtgcagctgtctaatgctgcggtagaggcaatcaagccgattttggcgatgtctggtgtccttggtgtgcgcgttatcgctgcgacaactctcgaagaatttcacgaacacatcaggccgaaccaagcattgacggagcgtttgcaggaaattcgactaacgccgaccgatcagaagaccactgtggcgattttgcgtggtatggcagatcgttatggcgtaagtgatcagttctatgacgaccacgtttttgagcagatttactccaccactgagcgttttatgccgagttctgtccagcctcgtaaatccattcgtgtccttgatgcgatggttggttggcatcgactttccggcaagccgatggatatggatctgctcggtgatgtgctccacgatgctattggtgtcgatattgcattcaaggtcgatggtacgagcattaaagacaagcttgatgagaaggtaatggcgcaaagtcttgccaccactgtggtagcacgtcgtttgcagctggtggtggcggatcttcatgataaatcacggccactgtcgaacttcttgttcaccgggcctactggtgtcggtaaaacagagctggtcaagcaactagcacgggtgctctttggtgatgacactgggcgattgattcgttttgacatgtcagagttcgccttagaatcaagtcttgaccttttcaggtctgagctcactcgtcgtgtcgctgaccagggtaacgctattgtcctgctcgatgaggttgagaaagctgatcgagctattgcgcggttgttactgcaggtacttgatgatggccgactatctgacgattacaaccgtgaggtgagttttcttaatacctatatcgtcatgacaactaacgctggttctgagattttcgagacaatttcgaactatgccactgatgacacgggcgatggtcgggcgatcaaagactttgtgaaaaacattcacacgtcgatcaagaataagggttttccacctgagcttcttggtcgtgtagatgaaattgtgccttttcaaccgctgtcggagacgacacaggacaggattattagcaagaagctgcaggatgtggctactgaggtctatgaacgccacggcgtgaaactgcactgttcacaaaaggttatggagtttctgcttgtggatcaggtggaggaaagtgctgaatctggtggtgcccgtggtgcggtgcggtctttgcagcgggaagtggtcactgaagtggcgacctttattaatacctacccagaagtgcgtgacatttacgttgatgtcgatggtcagatgcgtaataagactaaccgtgtgtctacggcccgtgtggtgataaagcgtgtcgaaggttaattactctggggtcgcttaaa

SEQ ID NO: 160 - protein, 595 aa, Corynebacterium glutamicum
MTQVVAGTLVGESINREIDEDKYPYLSSYAAPVAVPVREIIGREEEVNKIMAALMRPEISNVMLVGPAGSGKTTLVQQALVKDPERNYIEVDVAKMVADLSTPAQMAARIKGVFEDAIAYRKHEGHELVLFVDEFHQIVQLSNAAVEAIKPILAMSGVLGVRVIAATTLEEFHEHIRPNQALTERLQEIRLTPTDQKTTVAILRGMADRYGVSDQFYDDHVFEQIYSTTERFMPSSVQPRKSIRVLDAMVGWHRLSGKPMDMDLLGDVLHDAIGVDIAFKVDGTSIKDKLDEKVMAQSLATTVVARRLQLVVADLHDKSRPLSNFLFTGPTGVGKTELVKQLARVLFGDDTGRLIRFDMSEFALESSLDLFRSELTRRVADQGNAIVLLDEVEKADRAIARLLLQVLDDGRLSDDYNREVSFLNTYIVMTTNAGSEIFETISNYATDDTGDGRAIKDFVKNIHTSIKNKGFPPELLGRVDEIVPFQPLSETTQDRIISKKLQDVATEVYERHGVKLHCSQKVMEFLLVDQVEESAESGGARGAVRSLQREVVTEVATFINTYPEVRDIYVDVDGQMRNKTNRVSTARVVIKRVEG

SEQ ID NO: 161 - DNA, 1401 bp, Corynebacterium glutamicum
  CDS (101)..(1378): RXN01120
acaggtaaagcgctaagatggaacaacccattgccaatattgttggttagagttgtacgcagtaaatcttttcaatcgtggaagcgggtctcacagtctaatggcacgtatgcaggaaagcgccgatctgctcaaatgttccttctgcggaaagagccaaaagcaggtaaaaaaactcatcgcgggtggcgccgtatatatctgtgatgagtgcattgagctgtgcaacgagattattgaagaagaactcggtcaagctcaacacgacgagcaggagcgcaacgagctccccaagccgtcggagatttcagccttccttgatacttatgtcatcgggcaggacccagcaaaacgtatcctgtcggttgcggtgtacaaccattacaagcgtctccgcgcatcggaaaccatcggtcgtcgcaggaatgacgagcctgaaaccgaactggttaagtccaatattttgatgctcggccccactggctccggcaagactttccttgcccagactttggcaaagctgctggatgttccttttgctatcgcggatgccacctcactgaccgaggctggttatgtgggcgaggatgtggaaaacatcttgctcaagctgcttcaggctgctgattttgatgtggaacgtgcacagcgcggcatcatttacatcgatgaagtggacaagatttcccgcaagtctgaaaacccatcgatcactcgcgatgtttccggtgaaggcgtgcagcaggcactgctgaaaattttggaaggcactgtcgccgcaatcccaccgcagggaggacgcaagcaccccaaccaggatttcatccagctggataccaccaacattttgttcatcgttgctggtgcgttctctggtctggagaaggtcatcgcggaccgcaatggcaagaaaggcttgggcttcggtgtggaggtctcttccaagaaggaagaagccaacattgtggatatcttcaaggatgtcctccctgaggacctggtgaagtttggtctcatcccagaattcattgggcgtctgccagtcgttgccaccgtatccaacctggatcagaaatctctggtcaaggttctcacggagcctcgtaactcattggtgaagcagtatcgacgtctgtttgaaatggatgacgctgtgttgacctttactgatgatgctttggaggagatcgctaatcaggcactcgagcgcaaaactggcgcccgtggcctgcgcgcgatcatggaagagatcctggttccgatcatgtatgacctcccagaccgtaaagacgttggcgaagtcatcatcaacggtgccgttgcccgtggcgaagccgaaccagagatgttggaagctgtcgcagaagaaaagaccgcgtagttggcaggagttatcaccgg

SEQ ID NO: 162 - protein, 426 aa, Corynebacterium glutamicum
MARMQESADLLKCSFCGKSQKQVKKLIAGGAVYICDECIELCNEIIEEELGQAQHDEQERNELPKPSEISAFLDTYVIGQDPAKRILSVAVYNHYKRLRASETIGRRRNDEPETELVKSNILMLGPTGSGKTFLAQTLAKLLDVPFAIADATSLTEAGYVGEDVENILLKLLQAADFDVERAQRGIIYIDEVDKISRKSENPSITRDVSGEGVQQALLKILEGTVAAIPPQGGRKHPNQDFIQLDTTNILFIVAGAFSGLEKVIADRNGKKGLGFGVEVSSKKEEANIVDIFKDVLPEDLVKFGLIPEFIGRLPVVATVSNLDQKSLVKVLTEPRNSLVKQYRRLFEMDDAVLTFTDDALEEIANQALERKTGARGLRAIMEEILVPIMYDLPDRKDVGEVIINGAVARGEAEPEMLEAVAEEKTA

SEQ ID NO: 163 - DNA, 1401 bp, Corynebacterium glutamicum; identical to SEQ ID NO: 161
  CDS (101)..(1378): FRXA01120

SEQ ID NO: 164 - protein, 426 aa, Corynebacterium glutamicum; identical to SEQ ID NO: 162

SEQ ID NO: 165 - DNA, 924 bp, Corynebacterium glutamicum
  CDS (101)..(901): RXN00397
tttttcgaggttggggtggcttttcgggtggcgtgtatgtattaaaccaaggagcttgtttgagggggagcgcttggtttgattcgacagttttcgggcattgagcctgacggaaggggagatcattcccatccaaacaaagctcggccactggcgtgacgtgcgggattccgaagatctgccattccaagtaatcgcatcgcgcaccaacgtgaccattatggaaaacaccctggaatggaccaacagccgccttgagcgtggcgaagagttcaccgagctcgacatttatgctcactacttggaagagttggaagattacgccctccaattcaccttcgatgtcgagccctacttcaccaacctgcactcctccaacagaatgctcttccctggacctcctgtggatttcccgatcaacgcagaaacccgatgcattcagctcgacgccggtgttgcagtaaagaaggacggcgtggtgctgggtacctcagatatggcgaggtccctgcctcgaaccgccgctggccaagaagcctatgagtacttcttcaaggtggttcgtgaaggcatcatcgggcagctgcgcccgggcgtgatctgcgctgacgtgcacgaagcaacccttgattacctaagcccgcagctacctcgcatgattgacatcggaatgctgggtgccgacaccgatttcaacaccatctaccgcaagcgcaatgttggccacctcatgggcaagcaggaatcctttgccaatgagcttcgccctggatacaagcacattcttcaccacggctcctatggtgccgcggagatcccttggcgctacaacggtgtagccattggtaccgaggatctgtggtacatcggcgcagacaagacctacattttgagccagcgctaaggagaacccagtgacagaaa

SEQ ID NO: 166 - protein, 267 aa, Corynebacterium glutamicum
LSLTEGEIIPIQTKLGHWRDVRDSEDLPFQVIASRTNVTIMENTLEWTNSRLERGEEFTELDIYAHYLEELEDYALQFTFDVEPYFTNLHSSNRMLFPGPPVDFPINAETRCIQLDAGVAVKKDGVVLGTSDMARSLPRTAAGQEAYEYFFKVVREGIIGQLRPGVICADVHEATLDYLSPQLPRMIDIGMLGADTDFNTIYRKRNVGHLMGKQESFANELRPGYKHILHHGSYGAAEIPWRYNGVAIGTEDLWYIGADKTYILSQR

SEQ ID NO: 167 - DNA, 2049 bp, Corynebacterium glutamicum
  CDS (101)..(2026): RXN01868
tgacaggctaccttctggggtggacatgatccccaacgctcaacccacttgtggcaccaaccacaaaccctgtggcggtaaatcccctagagtaggccacatgaaggatctttatcgctttgtcaatggcctgtggcttgacacccacatcattcccgacgatcgcgcggtggacggcacgttccacaagctgcgcgatgatgctgaagaagacgtccatgagatcgtcaaggaagacactggacgcgcaggcacactttatgcctcatttatggatactgacgccatcaacgctgctggtgttgcaccgctcgatgcggatctgaacaggctgtctgttgctaactcatcgtttttcgcagctgctctcggcgaactggaccgtgaaggcgttggcgcgccagtaggtttctgggtggagaaggattcttcctccaacgaatccgtcgcctatgtcatccagtccggcctcggcctgcccgatgaggcttattaccgcgaggaggcacacgccgaaactctcgcggcctacaaagagcacgttgagcgcatgctcggctacttggataacagccgcctcttcggtctgtcggctgcttccgctgccgcacgaattgtcgccctggaaacggaaatcgctgctggccactgggatgtcgtgaagacccgcgacgccgtagccacctacaaccccaccgaactcggcgcgctgccaccaaaggtccgcacgctgctcagttccgcaggcctcccggaccagcgcctggtatcgatgatgccgtcatacctcgaccacctcaacggcttgcttgtcgacgaccgcctccccgattggcagctatgggcaacctggcacatcttgaggtctcgagcaggactgttgaccgaggaaattagccaagcaaacttcgacttctatggcaccaaactgtccggcgccaccgagcaaaaagatcgatggaagcgtgctgtcggcctggcagagcgcatggtgggcgaggaaatcgggcaacgattcgtcgaaaggcattttcctgcaagctccaaggagcacatgcttgagctcgtcgactacctggttgccgcctaccgtgatcgcatttccaacctcgaatggatgacgcccgccacccgcgagcgtgccctggaaaagttgggcaaattcaacgcgaaaatcggctaccccgacaagtggcgctcctacgaaggcctcgaattcggctccgacctggtggacaactcccgcaagggctccgcgttcctccatgactatgagctgggcaagatcggcaaaccagccgaccgcgacgaatgggtcaccaccccacaaaccgtcaacgccttctacaaccccgtggtcaacgacatcaccttccccgcagccatcctgcgcgcaccattcttcgaccccgaagcagaagccgcagaaaacttcggtgcaatcggtgctgtgatcggacacgaaatcggccacggctttgacgatcaaggcagccaatacgacggcgacggcaacctcaactcctggtggaccgacgaagaccgctccgcattcgagcagctcacctcacgtctggtcacccaattcagcggactcgtccctgccgtcctgacctctgaaggaatcgacaccgacggcgtcaacggtgaattcactctcggcgaaaacatcggtgacctcggcggattgggcatcgctgtcgttgcctacgaaaagtacctcgcagaccgtggccaaacctttgaaacctcaccagtccaaaaattcgaagcagaaggcgccgaggaaggcctggccgagcaagaattcaacggtctccaacgcctcttcctgtcctgggctcgcgtgtggcgcaccaaaatccgcccacagatggccgtccaatacctggccatcgacccacactcccctgcagaattccgctgcaatgtcatcgccggaaacgtcgctgaattctacgaagcattcgacgtccccgaagatgcacctgtgtacatcaagccagaagagcgcctagctatctggtagttgttagttggtattgaaaa

SEQ ID NO: 168 - protein, 642 aa, Corynebacterium glutamicum
MKDLYRFVNGLWLDTHIIPDDRAVDGTFHKLRDDAEEDVHEIVKEDTGRAGTLYASFMDTDAINAAGVAPLDADLNRLSVANSSFFAAALGELDREGVGAPVGFWVEKDSSSNESVAYVIQSGLGLPDEAYYREEAHAETLAAYKEHVERMLGYLDNSRLFGLSAASAAARIVALETEIAAGHWDVVKTRDAVATYNPTELGALPPKVRTLLSSAGLPDQRLVSMMPSYLDHLNGLLVDDRLPDWQLWATWHILRSRAGLLTEEISQANFDFYGTKLSGATEQKDRWKRAVGLAERMVGEEIGQRFVERHFPASSKEHMLELVDYLVAAYRDRISNLEWMTPATRERALEKLGKFNAKIGYPDKWRSYEGLEFGSDLVDNSRKGSAFLHDYELGKIGKPADRDEWVTTPQTVNAFYNPVVNDITFPAAILRAPFFDPEAEAAENFGAIGAVIGHEIGHGFDDQGSQYDGDGNLNSWWTDEDRSAFEQLTSRLVTQFSGLVPAVLTSEGIDTDGVNGEFTLGENIGDLGGLGIAVVAYEKYLADRGQTFETSPVQKFEAEGAEEGLAEQEFNGLQRLFLSWARVWRTKIRPQMAVQYLAIDPHSPAEFRCNVIAGNVAEFYEAFDVPEDAPVYIKPEERLAIW

SEQ ID NO: 169 - DNA, 1734 bp, Corynebacterium glutamicum
  CDS (101)..(1711): FRXA01868
atgcggatctgaacaggctgtctgttgctaactcatcgttttcgcagctgctctcggcgaactggaccgtgaaggcgttggcgcgccagtaggtttctgggtggagaaggattcttcctccaacgaatccgtcgcctatgtcatccagtccggcctcggcctgcccgatgaggcttattaccgcgaggaggcacacgccgaaactctcgcggcctacaaagagcacgttgagcgcatgctcggctacttggataacagccgcctcttcggtctgtcggctgcttccgctgccgcacgaattgtcgccctggaaacggaaatcgctgctggccactgggatgtcgtgaagacccgcgacgccgtagccacctacaaccccaccgaactcggcgcgctgccaccaaaggtccgcacgctgctcagttccgcaggcctcccggaccagcgcctggtatcgatgatgccgtcatacctcgaccacctcaacggcttgcttgtcgacgaccgcctccccgattggcagctatgggcaacctggcacatcttgaggtctcgagcaggactgttgaccgaggaaattagccaagcaaacttcgacttctatggcaccaaactgtccggcgccaccgagcaaaaagatcgatggaagcgtgctgtcggcctggcagagcgcatggtgggcgaggaaatcgggcaacgattcgtcgaaaggcattttcctgcaagctccaaggagcacatgcttgagctcgtcgactacctggttgccgcctaccgtgatcgcatttccaacctcgaatggatgacgcccgccacccgcgagcgtgccctggaaaagttgggcaaattcaacgcgaaaatcggctaccccgacaagtggcgctcctacgaaggcctcgaattcggctccgacctggtggacaactcccgcaagggctccgcgttcctccatgactatgagctgggcaagatcggcaaaccagccgaccgcgacgaatgggtcaccaccccacaaaccgtcaacgccttctacaaccccgtggtcaacgacatcaccttccccgcagccatcctgcgcgcaccattcttcgaccccgaagcagaagccgcagaaaacttcggtgcaatcggtgctgtgatcggacacgaaatcggccacggctttgacgatcaaggcagccaatacgacggcgacggcaacctcaactcctggtggaccgacgaagaccgctccgcattcgagcagctcacctcacgtctggtcacccaattcagcggactcgtccctgccgtcctgacctctgaaggaatcgacaccgacggcgtcaacggtgaattcactctcggcgaaaacatcggtgacctcggcggattgggcatcgctgtcgttgcctacgaaaagtacctcgcagaccgtggccaaacctttgaaacctcaccagtccaaaaattcgaagcagaaggcgccgaggaaggcctggccgagcaagaattcaacggtctccaacgcctcttcctgtcctgggctcgcgtgtggcgcaccaaaatccgcccacagatggccgtccaatacctggccatcgacccacactcccctgcagaattccgctgcaatgtcatcgccggaaacgtcgctgaattctacgaagcattcgacgtccccgaagatgcacctgtgtacatcaagccagaagagcgcctagctatctggtagttgttagttggtattgaaaa

SEQ ID NO: 170 - protein, 537 aa, Corynebacterium glutamicum
VEKDSSSNESVAYVIQSGLGLPDEAYYREEAHAETLAAYKEHVERMLGYLDNSRLFGLSAASAAARIVALETEIAAGHWDVVKTRDAVATYNPTELGALPPKVRTLLSSAGLPDQRLVSMMPSYLDHLNGLLVDDRLPDWQLWATWHILRSRAGLLTEEISQANFDFYGTKLSGATEQKDRWKRAVGLAERMVGEEIGQRFVERHFPASSKEHMLELVDYLVAAYRDRISNLEWMTPATRERALEKLGKFNAKIGYPDKWRSYEGLEFGSDLVDNSRKGSAFLHDYELGKIGKPADRDEWVTTPQTVNAFYNPVVNDITFPAAILRAPFFDPEAEAAENFGAIGAVIGHEIGHGFDDQGSQYDGDGNLNSWWTDEDRSAFEQLTSRLVTQFSGLVPAVLTSEGIDTDGVNGEFTLGENIGDLGGLGIAVVAYEKYLADRGQTFETSPVQKFEAEGAEEGLAEQEFNGLQRLFLSWARVWRTKIRPQMAVQYLAIDPHSPAEFRCNVIAGNVAEFYEAFDVPEDAPVYIKPEERLAIW

SEQ ID NO: 171 - DNA, 426 bp, Corynebacterium glutamicum
  CDS (101)..(403): FRXA01869
tgacaggctaccttctggggtggacatgatccccaacgctcaacccacttgtggcaccaaccacaaaccctgtggcggtaaatcccctagagtaggccacatgaaggatctttatcgctttgtcaatggcctgtggcttgacacccacatcattcccgacgatcgcgcggtggacggcacgttccacaagctgcgcgatgatgctgaagaagacgtccatgagatcgtcaaggaagacactggacgcgcaggcacactttatgcctcatttatggatactgacgccatcaacgctgctggtgttgcaccgctcgatgcggatctgaacaggctgtctgttgctaactcatcgttttcgcagctgctctcggcgaactggaccgtgaaggcgttggcgcgccagtaggtttctgggtggagaaggat

SEQ ID NO: 172 - protein, 101 aa, Corynebacterium glutamicum
MKDLYRFVNGLWLDTHIIPDDRAVDGTFHKLRDDAEEDVHEIVKEDTGRAGTLYASFMDTDAINAAGVAPLDADLNRLSVANSSFSQLLSANWTVKALARQ

SEQ ID NO: 173 - DNA, 1404 bp, Corynebacterium glutamicum
  CDS (101)..(1381): RXN00499
tgccaacaggggatatgccactgtgtaccccacggcgatgatcggtaaaatcctcggcgcgcagatattgttcttgctgctctaaggtgatttttgggcagtggtgggggtggtgtccacccctgcgcgtaacctgggaagcatgactaaaacacttggttcccttcagctggaagaaatcacgctgaccctccctctgactgaagatgtggccgatgaacgcaccattgatgtgttcgcacgcattgccacacgcgtcggtggggaagaccttccatatttagtattcctgcagggtgggcctggcaatgaagctccacgtccaagccttaatcccctcaaccccaattggttgggcgtggccttggaggaataccgcgtggtcatgttggatcaacgtggcaccggccgttccaccccagtgggtaatgatattttggaaaaacccacagcagaagtagtggagtacttatcccacctgcgcgcagatggcattgtgcgagatgctgaagccctgcgtaagcatttgggtgtgaatcagtggaaccttttaggccagtccttcggaggtttcaccaccctgcattacttgtcccggcacgccgattccttggacaacgtgtttattaccggcggtctcagcgctattgatcgcccagcagaagacgtgtatgccaactgttacaaccgcatgcgccgaaactctgaggaattctaccgtcgcttcccgcaattacgggaaactttccgagggttggttaatcgtgctcgcgccggggagattgtgcttcccaccggcgaagttgtgtcagaaaccaggctgcgatcccttggtcacttgttgggtagcaatgacggctggtttgatctgtacaacctgctggaattagatcccacctccaacgcttttgtccatgacctggcaggacttttgcctttcggcaaccgcaacccaatttattacgtgctccatgagtcctcttacgccgacggtgtggtgacaaattgggcagcagagcgtgtgcttccagaggatttccgcgaggatccaacactgctcaccggtgagcacgtgttccaggagtggacagacaccgtgccgtcgctcaagccgtggaaggacgttgccctggcattggctcagcaggaatggcccaagctttatgatgcgaaggcattggaaaactcacaggccaagggcgctgcagcagtgtatgccaatgacgttttcgtcccagtggattactctctggaaaccgcacaacacctgcccggtgtgcagctgtttatcaccagccagcatgaacacaatggacttcgtgccagctcaggcgcagtactgaagcaccttttcgatctggcccacggccgagaggtacgctgattcctcgtgttagtactagc

SEQ ID NO: 174 - protein, 427 aa, Corynebacterium glutamicum
VVGVVSTPARNLGSMTKTLGSLQLEEITLTLPLTEDVADERTIDVFARIATRVGGEDLPYLVFLQGGPGNEAPRPSLNPLNPNWLGVALEEYRVVMLDQRGTGRSTPVGNDILEKPTAEVVEYLSHLRADGIVRDAEALRKHLGVNQWNLLGQSFGGFTTLHYLSRHADSLDNVFITGGLSAIDRPAEDVYANCYNRMRRNSEEFYRRFPQLRETFRGLVNRARAGEIVLPTGEVVSETRLRSLGHLLGSNDGWFDLYNLLELDPTSNAFVHDLAGLLPFGNRNPIYYVLHESSYADGVVTNWAAERVLPEDFREDPTLLTGEHVFQEWTDTVPSLKPWKDVALALAQQEWPKLYDAKALENSQAKGAAAVYANDVFVPVDYSLETAQHLPGVQLFITSQHEHNGLRASSGAVLKHLFDLAHGREVR

SEQ ID NO: 175 - DNA, 980 bp, Corynebacterium glutamicum
  CDS (1)..(957): FRXA00499
ggtaatgatattttggaaaaacccacagcagaagtagtggagtacttatcccacctgcgcgcagatggcattgtgcgagatgctgaagccctgcgtaagcatttgggtgtgaatcagtggaaccttttaggccagtccttcggaggtttcaccaccctgcattacttgtcccggcacgccgattccttggacaacgtgtttattaccggcggtctcagcgctattgatcgcccagcagaagacgtgtatgccaactgttacaaccgcatgcgccgaaactctgaggaattctaccgtcgcttcccgcaattacgggaaactttccgagggttggttaatcgtgctcgcgccggggagattgtgcttcccaccggcgaagttgtgtcagaaaccaggctgcgatcccttggtcacttgttgggtagcaatgacggctggtttgatctgtacaacctgctggaattagatcccacctccaacgcttttgtccatgacctggcaggacttttgcctttcggcaaccgcaacccaatttattacgtgctccatgagtcctcttacgccgacggtgtggtgacaaattgggcagcagagcgtgtgcttccagaggatttccgcgaggatccaacactgctcaccggtgagcacgtgttccaggagtggacagacaccgtgccgtcgctcaagccgtggaaggacgttgccctggcattggctcagcaggaatggcccaagctttatgatgcgaaggcattggaaaactcacaggccaagggcgctgcagcagtgtatgccaatgacgttttcgtcccagtggattactctctggaaaccgcacaacacctgcccggtgtgcagctgtttatcaccagccagcatgaacacaatggacttcgtgccagctcaggcgcagtactgaagcaccttttcgatctggcccacggccgagaggtacgctgattcctcgtgttagtactagc

SEQ ID NO: 176 - protein, 319 aa, Corynebacterium glutamicum
GNDILEKPTAEVVEYLSHLRADGIVRDAEALRKHLGVNQWNLLGQSFGGFTTLHYLSRHADSLDNVFITGGLSAIDRPAEDVYANCYNRMRRNSEEFYRRFPQLRETFRGLVNRARAGEIVLPTGEVVSETRLRSLGHLLGSNDGWFDLYNLLELDPTSNAFVHDLAGLLPFGNRNPIYYVLHESSYADGVVTNWAAERVLPEDFREDPTLLTGEHVFQEWTDTVPSLKPWKDVALALAQQEWPKLYDAKALENSQAKGAAAVYANDVFVPVDYSLETAQHLPGVQLFITSQHEHNGLRASSGAVLKHLFDLAHGREVR

SEQ ID NO: 177 - DNA, 2127 bp, Corynebacterium glutamicum
  CDS (101)..(2104): RXN01277
tactactcggttcacgtttacgtcggctgatccaattggaggcgccctcggaagccgccttaaaaaacctgccggtcaaaagatcactaacctgaacttcatgactgattacacgttcctcgaagacattgacaccccggaagcgctcgcgtgggcggaaaaatggtcgggggaaagcgtcgaaaagctaaaaagcccagccaaggacgccctggaagccaggctgctggctgcgttggacaccgatgatcgcattgcctacgtgagccggcgcggtgagaagctgtacaacttttggcgggacgcgcagcatccgcgtggagtgtggcgcacgaccacgttggagtcgtatgaaagtgaccagccggagtgggacgtgctcattgatgtggatgcgttggcggaggatgagggcgaaaactgggtatggaagggcgcggttgtgcgctcgccggagtttgatcgggcgttggtgaagttctcgcggggcggggctgatgcgacggtgattagggagtttgatctggccacggctgctttcgtggatgattcgccgtttgaattgaaggaggcgaagtccgatgtcacgtgggttgatctggatacgttgctggtgggcacggataccggcgaggggtcactgacggattctgggtacccggcgcgggtgctcacgtggaagcgtgggactccgcttgagcaggcggagttgttctttgaggggtcgcgtcaggatgtggcgactcatgcgtggcgggattcaacacctggttttgagcggacgtttgtgtcaaggtcgttggatttctataattcggagacgtcgctggaaaccgagggtggcctggtcaagcttgatgtgccgaccgattgcgatgtcattgtgaagaagcagtggatttttgtgagtcctcggacggatttcgctgggattccagcaggtggcttgggagtgctgctgttaaaggagttccttgagggcgggcgcgattttcagcctgtgtttacgcctactgagtcgacgtcgctgcagggattggccacgacaaagaatttcctggttttaacgctccttaataatgtctccacagaaatcgtcacagtgccgctcaatgatccgacaacggagcatgaacacattgacctcccagagcatgtcaccgcgcatgtggttgctacctccccgttggatggcgatgaaatttgggtgcaggcagcgagtttcaccgaagcgccaacgttgctgcgtgcggagctgcctggtgcgcttgaggctgtgaagaaggcgccgttgcagtttgaaaatgctggtcaggagactcgtcagcattgggcaacctcggcggatggaacgaagattccgtactttattacaggagccttcgaggaggaaccacaaaacaccctggtccacgcctacggcggcttcgaggtttcccttaccccaagccactccccgacccgcggcatcgcatggttggaaaagggctactactttgtggaagccaacctgcgtggtggcggtgaattcggtccggaatggcattcgcaggcaaccaagctgaaccgcatgaaggtgtgggaggatcaccgcgcggtgctcgccgaccttgtggagcgcggctacgcaacgccggagcagattgcgattcgtggcggatccaacggtggtttgctgacaagtggcgcgttaactcagtacccagaagcattcggtgcggcagttgtgcaggtgccgttggctgatatgttgcgctatcacacctggtcagcgggtgcttcgtggatggcggagtacggcaaccctgacgatccggaggaacgggcggtgattgagcagtactcgccggtgcaggcggtggtgggcgtcgagaagcgaatttatccacccgcattggtgacgacctcaacccgggacgaccgcgtccaccccgcgcacgcgcgcctttttgctcaagctttgcttgatgcgggccaggccgtggattactacgaaaacaccgagggcggccatgccggcgcggcggataacaagcagaccgcgtttgtggaatcgctgatctacacctggatcgagaagactttggatcagcagggtagcatttaatacctatgattatgcgaagg

SEQ ID NO: 178 - protein, 668 aa, Corynebacterium glutamicum
MTDYTFLEDIDTPEALAWAEKWSGESVEKLKSPAKDALEARLLAALDTDDRIAYVSRRGEKLYNFWRDAQHPRGVWRTTTLESYESDQPEWDVLIDVDALAEDEGENWVWKGAVVRSPEFDRALVKFSRGGADATVIREFDLATAAFVDDSPFELKEAKSDVTWVDLDTLLVGTDTGEGSLTDSGYPARVLTWKRGTPLEQAELFFEGSRQDVATHAWRDSTPGFERTFVSRSLDFYNSETSLETEGGLVKLDVPTDCDVIVKKQWIFVSPRTDFAGIPAGGLGVLLLKEFLEGGRDFQPVFTPTESTSLQGLATTKNFLVLTLLNNVSTEIVTVPLNDPTTEHEHIDLPEHVTAHVVATSPLDGDEIWVQAASFTEAPTLLRAELPGALEAVKKAPLQFENAGQETRQHWATSADGTKIPYFITGAFEEEPQNTLVHAYGGFEVSLTPSHSPTRGIAWLEKGYYFVEANLRGGGEFGPEWHSQATKLNRMKVWEDHRAVLADLVERGYATPEQIAIRGGSNGGLLTSGALTQYPEAFGAAVVQVPLADMLRYHTWSAGASWMAEYGNPDDPEERAVIEQYSPVQAVVGVEKRIYPPALVTTSTRDDRVHPAHARLFAQALLDAGQAVDYYENTEGGHAGAADNKQTAFVESLIYTWIEKTLDQQGSI

SEQ ID NO: 179 - DNA, 1812 bp, Corynebacterium glutamicum
  CDS (101)..(1789): FRXA01277
tactactcggttcacgtttacgtcggctgatccaattggaggcgccctcggaagccgccttaaaaaacctgccggtcaaaagatcactaacctgaacttcatgactgattacacgttcctcgaagacattgacaccccggaagcgctcgcgtgggcggaaaaatggtcgggggaaagcgtcgaaaagctaaaaagcccagccaaggacgccctggaagccaggctgctggctgcgttggacaccgatgatcgcattgcctacgtgagccggcgcggtgagaagctgtacaacttttggcgggacgcgcagcatccgcgtggagtgtggcgcacgaccacgttggagtcgtatgaaagtgaccagccggagtgggacgtgctcattgatgtggatgcgttggcggaggatgagggcgaaaactgggtatggaagggcgcggttgtgcgctcgccggagtttgatcgggcgttggtgaagttctcgcggggcggggctgatgcgacggtgattagggagtttgatctggccacggctgctttcgtggatgattcgccgtttgaattgaaggaggcgaagtccgatgtcacgtgggttgatctggatacgttgctggtgggcacggataccggcgaggggtcactgacggattctgggtacccggcgcgggtgctcacgtggaagcgtgggactccgcttgagcaggcggagttgttctttgaggggtcgcgtcaggatgtggcgactcatgcgtggcgggattcaacacctggttttgagcggacgtttgtgtcaaggtcgttggatttctataattcggagacgtcgctggaaaccgagggtggcctggtcaagcttgatgtgccgaccgattgcgatgtcattgtgaagaagcagtggatttttgtgagtcctcggacggatttcgctgggattccagcaggtggcttgggagtgctgctgttaaaggagttccttgagggcgggcgcgattttcagcctgtgtttacgcctactgagtcgacgtcgctgcagggattggccacgacaaagaatttcctggttttaacgctccttaataatgtctccacagaaatcgtcacagtgccgctcaatgatccgacaacggagcatgaacacattgacctcccagagcatgtcaccgcgcatgtggttgctacctccccgttggatggcgatgaaatttgggtgcaggcagcgagtttcaccgaagcgccaacgttgctgcgtgcggagctgcctggtgcgcttgaggctgtgaagaaggcgccgttgcagtttgaaaatgctggtcaggagactcgtcagcattgggcaacctcggcggatggaacgaagattccgtactttattacaggagccttcgaggaggaaccacaaaacaccctggtccacgcctacggcggcttcgaggtttcccttaccccaagccactccccgacccgcggcatcgcatggttggaaaagggctactactttgtggaagccaacctgcgtggtggcggtgaattcggtccggaatggcattcgcaggcaaccaagctgaaccgcatgaaggtgtgggaggatcaccgcgcggtgctcgccgaccttgtggagcgcggctacgcaacgccggagcagattgcgattcgtggcggatccaacggtggtttgctgacaagtggcgcgttaactcagtacccagaagcattcggtgcggcagttgtgcaggtgccgttggctgatatgttgcgctatcacacctggtcagcgggtacctcgtggatgtaggtgtcggcaaccatgggaac

SEQ ID NO: 180 - protein, 563 aa, Corynebacterium glutamicum
MTDYTFLEDIDTPEALAWAEKWSGESVEKLKSPAKDALEARLLAALDTDDRIAYVSRRGEKLYNFWRDAQHPRGVWRTTTLESYESDQPEWDVLIDVDALAEDEGENWVWKGAVVRSPEFDRALVKFSRGGADATVIREFDLATAAFVDDSPFELKEAKSDVTWVDLDTLLVGTDTGEGSLTDSGYPARVLTWKRGTPLEQAELFFEGSRQDVATHAWRDSTPGFERTFVSRSLDFYNSETSLETEGGLVKLDVPTDCDVIVKKQWIFVSPRTDFAGIPAGGLGVLLLKEFLEGGRDFQPVFTPTESTSLQGLATTKNFLVLTLLNNVSTEIVTVPLNDPTTEHEHIDLPEHVTAHVVATSPLDGDEIWVQAASFTEAPTLLRAELPGALEAVKKAPLQFENAGQETRQHWATSADGTKIPYFITGAFEEEPQNTLVHAYGGFEVSLTPSHSPTRGIAWLEKGYYFVEANLRGGGEFGPEWHSQATKLNRMKVWEDHRAVLADLVERGYATPEQIAIRGGSNGGLLTSGALTQYPEAFGAAVVQVPLADMLRYHTWSAGTSWM

SEQ ID NO: 181 - DNA, 915 bp, Corynebacterium glutamicum
  CDS (101)..(892): RXN00675
gtggaagtactcacctcaaggtggccggaaccgcatgcattgtgcggtgccggccacctttggttttaacagtttaatttgaagaaagagacgtggaagcatgggtttccgttccaagaagaaggttattgcggcaaagaccgccgctgagctggacgcgatgcaggcggcgggtgagatcgtcggcaaggctttgcaggctgtgcgcgctgaggctaaagctggcatgagcacgtgggatctggatcagatcgcggagcaggttatccgcgatgctggcgccgttcctacattcctgggttaccagggttttccggcatcagtgtgcgcttcggtcaatgaggtgattgttcacggcattccatccaaggagaccatcttggaggaaggcgatctggtgtccatcgactgcggcgcaacctttgatggttgggtcggcgattccgcgtggagcttcggcatcggcgagctggacgaggacgtccagggtctcaacttggctaccgagtgggtcctcatggaaggcatgaaggccatggttccaggcaaccgtttgaccgatgtctcccacgctctcgaggtcgcaacccgcaaggctgagtccaagttcggcgtcgcgctcggcatcgtcgatggctacggcggacacggcattggccgccacatgcacgaggagccatacttggctaatgagggcaaggccggcaagggccctgtgattcaggagggctccgtgctcgccattgagcctatgctcaccctcggcaccgaagattccgcagtgctggaagatgattggactgtcgtgactctcgacggttcatgggcatcacactgggagcacaccgttgcagccaccaagggcggcccgcgcatcctcacgccgcgttattaaaatgatgcttttcgacgcat

SEQ ID NO: 182 - protein, 264 aa, Corynebacterium glutamicum
MGFRSKKKVIAAKTAAELDAMQAAGEIVGKALQAVRAEAKAGMSTWDLDQIAEQVIRDAGAVPTFLGYQGFPASVCASVNEVIVHGIPSKETILEEGDLVSIDCGATFDGWVGDSAWSFGIGELDEDVQGLNLATEWVLMEGMKAMVPGNRLTDVSHALEVATRKAESKFGVALGIVDGYGGHGIGRHMHEEPYLANEGKAGKGPVIQEGSVLAIEPMLTLGTEDSAVLEDDWTVVTLDGSWASHWEHTVAATKGGPRILTPRY

SEQ ID NO: 183 - DNA, 506 bp, Corynebacterium glutamicum
  CDS (1)..(483): FRXA00675
tgcggcgcaacctttgatggttgggtcggcgattccgcgtggagcttcggcatcggcgagctggacgaggacgtccagggtctcaacttggctaccgagtgggtcctcatggaaggcatgaaggccatggttccaggcaaccgtttgaccgatgtctcccacgctctcgaggtcgcaacccgcaaggctgagtccaagttcggcgtcgcgctcggcatcgtcgatggctacggcggacacggcattggccgccacatgcacgaggagccatacttggctaatgagggcaaggccggcaagggccctgtgattcaggagggctccgtgctcgccattgagcctatgctcaccctcggcaccgaagattccgcagtgctggaagatgattggactgtcgtgactctcgacggttcatgggcatcacactgggagcacaccgttgcagccaccaagggcggcccgcgcatcctcacgccgcgttattaaaatgatgcttttcgacgcat

SEQ ID NO: 184 - protein, 161 aa, Corynebacterium glutamicum
CGATFDGWVGDSAWSFGIGELDEDVQGLNLATEWVLMEGMKAMVPGNRLTDVSHALEVATRKAESKFGVALGIVDGYGGHGIGRHMHEEPYLANEGKAGKGPVIQEGSVLAIEPMLTLGTEDSAVLEDDWTVVTLDGSWASHWEHTVAATKGGPRILTPRY

SEQ ID NO: 185 - DNA, 1788 bp, Corynebacterium glutamicum
  CDS (101)..(1765): RXN00877
aaataatggggctcgccggtgatggttcccgccgggcattcaacggtgacggaagaggtggcagacatgatgaaaactctagcaactagtatcggtcactatgactgttgaacacctgctcaagcccagcaccttgccctaccagctgcccgatttcgcagcgatcaaggtggctgatttcccgcccgccttcgaactcgcattagctgaacacgatgctgaaattacagcgatcgctaccaatgaggacgctcctacctgggagaacaccattgaggccctggaacgcgcaggcctgtccctcaaccgcgtcgccgccgtattcttcaacttgcagggcaccgattcctcccctgaaatggatgaaatcgcagccactatcgcgccgaaactctccgcgcattcggatgcgattttccacaatgctgcgcttttcgcgcgcattgaggccgtagaagcaccggccgacgaggaatcgcaacgcctgttgtcccacaccaagcgcgcttttcgacgtcgcggtgcagcactcaacgccgacggcaaggcccgactgagcaccatcaaccagcgcctatcggcactgtccgaacagttcggccgcaacctgcttcaggacacccgcgatctggcggtcaactttgaagaatctgaacttgccggttttagcgaagcccgcatatccgccgccgctgactacgcagcagcagttggcaccgaaggctacgtggttccactggaactgcccaccgtgcagtcagagcaggcagtattaaccgaatccgcctcgcgtgcaaagctttatgaagcctcccagaagcgtggcgccagcctgaacaaggacgtgctgctcgaaaccgtgcgtctgcgtgctgaacgcgccacacttttaggctacgacacccacgccgattacgtcatcgaagaagaaaccgccgatgacgtcgcagccgtgcgcgccttgctttatgatctcgccccagccgcctctgccaatgcgaaagccgaatacaaactctccgcagaagaagcagaagaacacggccaaaaagtcggcgcagctgactggagcttctgggaagccaaagtccgcgcccgcgactacgccctggacgaaaccgaactgcgcaactacttcccattgaaccaagtactccgtgacggcgtcttcttcgctgctaaccgcctctacggaatcaccgtggaaccacgccctgacctgcgcggttacgccgagggcgtggacgtctgggaagtcctcgattctgacggctccggcatcggcctgatccttaccgactactacggccgaccatccaagcggggcggcgcttggatgtccagctttgtcgaccaatccgagctgctaggcaccaagccagtcgtggtcaacgttatgggtattaccaaaccaaccaccggcgaagcactactcagcctcgatgaagtaaccaccatcttccacgaattcggccacggcctgcacggcttgctgtccaaggtgcgctacccaagcttctccggaacctccgtgccccgcgactacgtagaattcccctcccagatcaacgaaaactgggcattcgaccctgcagtagtccgcaactacgcccgccacgtggacaccggcgacatcattccagactccctgcttgaggcagtggaagcatgtggcatttcagacagagtggtggaacatgtgagtacttgtccccatctattatcgacctgccctgtctctccctgtccacagcggatgccgcactagtcaatgacattgaccaatta

SEQ ID NO: 186 - protein, 555 aa, Corynebacterium glutamicum
MTVEHLLKPSTLPYQLPDFAAIKVADFPPAFELALAEHDAEITAIATNEDAPTWENTIEALERAGLSLNRVAAVFFNLQGTDSSPEMDEIAATIAPKLSAHSDAIFHNAALFARIEAVEAPADEESQRLLSHTKRAFRRRGAALNADGKARLSTINQRLSALSEQFGRNLLQDTRDLAVNFEESELAGFSEARISAAADYAAAVGTEGYVVPLELPTVQSEQAVLTESASRAKLYEASQKRGASLNKDVLLETVRLRAERATLLGYDTHADYVIEEETADDVAAVRALLYDLAPAASANAKAEYKLSAEEAEEHGQKVGAADWSFWEAKVRARDYALDETELRNYFPLNQVLRDGVFFAANRLYGITVEPRPDLRGYAEGVDVWEVLDSDGSGIGLILTDYYGRPSKRGGAWMSSFVDQSELLGTKPVVVNVMGITKPTTGEALLSLDEVTTIFHEFGHGLHGLLSKVRYPSFSGTSVPRDYVEFPSQINENWAFDPAVVRNYARHVDTGDIIPDSLLEAVEACGISDRVVEHVSTCPHLLSTCPVSPCPQRMPH

SEQ ID NO: 187 - DNA, 1088 bp, Corynebacterium glutamicum
  CDS (1)..(1065): FRXA00877
gcagcagcagttggcaccgaaggctacgtggttccactggaactgcccaccgtgcagtcagagcaggcagtattaaccgaatccgcctcgcgtgcaaagctttatgaagcctcccagaagcgtggcgccagcctgaacaaggacgtgctgctcgaaaccgtgcgtctgcgtgctgaacgcgccacacttttaggctacgacacccacgccgattacgtcatcgaagaagaaaccgccgatgacgtcgcagccgtgcgcgccttgctttatgatctcgccccagccgcctctgccaatgcgaaagccgaatacaaactctccgcagaagaagcagaagaacacggccaaaaagtcggcgcagctgactggagcttctgggaagccaaagtccgcgcccgcgactacgccctggacgaaaccgaactgcgcaactacttcccattgaaccaagtactccgtgacggcgtcttcttcgctgctaaccgcctctacggaatcaccgtggaaccacgccctgacctgcgcggttacgccgagggcgtggacgtctgggaagtcctcgattctgacggctccggcatcggcctgatccttaccgactactacggccgaccatccaagcggggcggcgcttggatgtccagctttgtcgaccaatccgagctgctaggcaccaagccagtcgtggtcaacgttatgggtattaccaaaccaaccaccggcgaagcactactcagcctcgatgaagtaaccaccatcttccacgaattcggccacggcctgcacggcttgctgtccaaggtgcgctacccaagcttctccggaacctccgtgccccgcgactacgtagaattcccctcccagatcaacgaaaactgggcattcgaccctgcagtagtccgcaactacgcccgccacgtggacaccggcgacatcattccagactccctgcttgaggcagtggaagcatgtggcatttcagacagagtggtggaacatgtgagtacttgtccccatctattatcgacctgccctgtctctccctgtccacagcggatgccgcactagtcaatgacattgaccaatta

SEQ ID NO: 188 - protein, 355 aa, Corynebacterium glutamicum
AAAVGTEGYVVPLELPTVQSEQAVLTESASRAKLYEASQKRGASLNKDVLLETVRLRAERATLLGYDTHADYVIEEETADDVAAVRALLYDLAPAASANAKAEYKLSAEEAEEHGQKVGAADWSFWEAKVRARDYALDETELRNYFPLNQVLRDGVFFAANRLYGITVEPRPDLRGYAEGVDVWEVLDSDGSGIGLILTDYYGRPSKRGGAWMSSFVDQSELLGTKPVVVNVMGITKPTTGEALLSLDEVTTIFHEFGHGLHGLLSKVRYPSFSGTSVPRDYVEFPSQINENWAFDPAVVRNYARHVDTGDIIPDSLLEAVEACGISDRVVEHVSTCPHLLSTCPVSPCPQRMPH

SEQ ID NO: 189 - DNA, 663 bp, Corynebacterium glutamicum
  CDS (101)..(640): RXN01226
cgtgcggggaaatttaaagtgatgacagtgcacgatcatcatggaggtttcctcacatggtggcggggcctgtttttgcttgtggtggactcatggttggatgggggatgtgaataactctccccttttagttgttggcctgggaaatcccggcccgaaatacgttggcacccgccacaatattggctttgaggttgcagaagaactagtgtcgcgcagctttggatcatttagtgtgcacaagcgctccaacaccgatatcgcgcagcttcctgggctaattgtggccaagccgcgcagctttatgaacctgtcgggaactccgattcgggcgctgtgtgacttctttaagatttccccagccaatgtcatcgtggtgcatgatgaattggagcttgatttcggctcagtgaagctacgtcagggtggcggggatcatgggcacaatggtctgaaatccacgtccaaatctttgggaactaaggactattggaagctcagcatgggtatcggtaggccaccgggtcggatggatccggcaagttttgtgttgaagccttttggcaagcaagaactggcggatattcccatcatggcggctgacgctgcagatctcgtcgaaaagcatttgcagcagggctagctacttgcgccgcgcctctt

SEQ ID NO: 190 - protein, 180 aa, Corynebacterium glutamicum
MGDVNNSPLLVVGLGNPGPKYVGTRHNIGFEVAEELVSRSFGSFSVHKRSNTDIAQLPGLIVAKPRSFMNLSGTPIRALCDFFKISPANVIVVHDELELDFGSVKLRQGGGDHGHNGLKSTSKSLGTKDYWKLSMGIGRPPGRMDPASFVLKPFGKQELADIPIMAADAADLVEKHLQQG

SEQ ID NO: 191 - DNA, 784 bp, Corynebacterium glutamicum
  CDS (101)..(784): RXN01963
cagattttctctgtgtgagctggggttttctgcatttcccacttgtttttctccaacactccacacacacaccttcaaagaagaaagttcgaaagattctatgaaaaaccgtaaaaaaatcatgtctaccctcaccactgtctgcgccgtactgggtatagttgcagctcatccattccacgcctctgctgtcatcggcggctctgtcccatcaactgattccgttgccaacgctgtcgcaaaaatcggaccaggcgcattgaactgcagcggtgtcatgatctcaccatcgtgggcactcaccgcacgccactgtgtcgatgacatcaacatactcggcgacatcgacaccatcacgcctattactccaggtattcatcgcaatgaaggtaactatatgggtgaggtttaccgcgcaccgtccggtgatctagcgctcattaatatcaacggcgtgcacaagggcaccattgcgcagctccccacacaagaatatccactgggaaccgctgcacagtcagtcggttttggtggcggtggtgtcaatatccgcaccgctgaatcggtcaacatgattctcaccgacatatatagcgtgaggtcagggaaattccatcacggtgtcggtcgatcacactatctcctctttgattatgacagtgctgaaactggtcgaatccacaaaggtgattctgggggccccatcttcattggtgacgaggttgtgggcattatgtctcacggcacaataaataagaacgacgggtcttttgatgacgaatcc

SEQ ID NO: 192 - protein, 228 aa, Corynebacterium glutamicum
MKNRKKIMSTLTTVCAVLGIVAAHPFHASAVIGGSVPSTDSVANAVAKIGPGALNCSGVMISPSWALTARHCVDDINILGDIDTITPITPGIHRNEGNYMGEVYRAPSGDLALININGVHKGTIAQLPTQEYPLGTAAQSVGFGGGGVNIRTAESVNMILTDIYSVRSGKFHHGVGRSHYLLFDYDSAETGRIHKGDSGGPIFIGDEVVGIMSHGTINKNDGSFDDES

SEQ ID NO: 193 - DNA, 906 bp, Corynebacterium glutamicum
  CDS (101)..(883): RXN00621
aaatgaatccgggtttttcagtttcggggtgcaaatcagaatgtcgccaatggcgaacacacgagcgtgcagaagatgtgcgtgactaagatcgggggctatgtctgaacgcctaaacgctccgcaagcaccaatccatcccatcacccgaacccaccacggtattgatttcgtagacaactatgaatggctgagggataaagaatcccaagaaaccttggactacctggaggcggagaatgcgttcaccaagcaggagactgaacagctagccacactgcgggacaacatctatgaagagattaagtcacgcgttaaagaaaccgacatgtccatcccagtgcgtgccggaaagcactggtattactctcgcactgaagaaggcaagagctacggctattcctgccgcattccagtgactgaagggtcggatgcatggacccctcctgttatccctgagggtgagccagcgcagggtgaaaccatcatcatggatgccaacgagttggcagaaggccacgaattcttctccatgggtgcatcatctgtcaccacctctggccgctaccttgcgtattccaccgatgtcacgggcgaagagcgctttacgttgcgcatcaaggatctagaaactggcgagctgcttcctgataccctgactggcattttctacggtgctacttgggtgggggaggagtacctcttttaccagcgcgttgatgatgcgtggcgtccagatactgtgtggcgccacaaggtgggtaccccggttgaagaagacgtgttggtgtaccacgagcctgatgaacgttattccacctgggtgggcaccactcgttcagaaaaagttcatcctttttggttgcgcctccaagatcacctctgaagtacgcgtgcttcctttcg

SEQ ID NO: 194 - protein, 261 aa, Corynebacterium glutamicum
MSERLNAPQAPIHPITRTHHGIDFVDNYEWLRDKESQETLDYLEAENAFTKQETEQLATLRDNIYEEIKSRVKETDMSIPVRAGKHWYYSRTEEGKSYGYSCRIPVTEGSDAWTPPVIPEGEPAQGETIIMDANELAEGHEFFSMGASSVTTSGRYLAYSTDVTGEERFTLRIKDLETGELLPDTLTGIFYGATWVGEEYLFYQRVDDAWRPDTVWRHKVGTPVEEDVLVYHEPDERYSTWVGTTRSEKVHPFWLRLQDHL

SEQ ID NO: 195 - DNA, 906 bp, Corynebacterium glutamicum; identical to SEQ ID NO: 193
  CDS (101)..(883): FRXA00621

SEQ ID NO: 196 - protein, 261 aa, Corynebacterium glutamicum; identical to SEQ ID NO: 194

SEQ ID NO: 197 - DNA, 1539 bp, Corynebacterium glutamicum
  CDS (101)..(1516): RXN00622
ttttaccagcgcgttgatgatgcgtggcgtccagatactgtgtggcgccacaaggtgggtaccccggttgaagaagacgtgttggtgtaccacgagcctgatgaacgttattccacctgggtgggcaccactcgttcagaaaaagttcatcctttttggttgcgcctccaagatcacctctgaagtacgcgtgcttcctttcgaccagccagagggcacccctgaggtgctgattccgcgcgcggagggtgtggaatacgacgtcgatcatgcagtcgtagacggctccgatatttggttggtcacacacaacgccgagggcccgaacttttcggtggggtgggctggcgtcgacaagctcaattctttggacgcgctggcgccactcgtcgcgcacaaggatgacgtgcgcattgagggtgtcgatacctaccgcgatttcatcatcctgggctacaggtccggcgcgatcggccaggtcgcgatcatgaagcttatcgacggaaccttcggcgatttccaacagctggaatttgacgaggaaatctacaccgtcgcatcgggcggaaacccagaatgggacgcccccgtcattcgcctttcttacggatcattcaccaccccggcgcagctgtttaactactggattgaatccggcgaacgcacgctgctgaagcagcaggaagtgctcggcggatacaagccgtcagactatgtggcctcccgattgtgggtcactgcgaaagatggcgcgcagattccagtgtccttggtgcaccgcaccgacctggatgtatccaagcccaaccccacgttgctctacggctatggttcctacgaatcatccattgatccaggcttctctatcgcgcgtttgtcactgatggatcgtggcatgatttttgcgattgcccacgttcgtggcggtggcgaaatgggtcgtggctggtacgacaacggcaaaaccaccacgaagaaaaacaccttcaccgacttcattgatgttgccgacgccctcatcgagcagaagatttctgcccctgaaatgctggttgcagaaggcggctcagctggtggcatgctcatgggcgccattgccaacatggccggtgaccgcttcaaggcgatcgaagccaacgtgccattcgtcgatccgctgacctctatgctcatgccggaactgccactgacggttatcgaatgggatgagtggggcgatccactccacgataaggacgtctatgaatacatggcgtcgtatgccccatatgaaaacatcgaggcaaagaactaccccaatatcttggccgtaacatcgctcaacgacacccgagtgttgtacgtcgaaccagccaaatgggtagcgcagcttcgggcgactgcaaccggtggagaattccttctgaaaactgaaatggttgccggacacggcggtgtgtcaggacgctacgaaaagtggcgtgagactgcatttgagtacggctggttgatcaaccaagcaaccggtgtgaccgaataaaacttgttcgactagcgaac

SEQ ID NO: 198 - protein, 472 aa, Corynebacterium glutamicum
MNVIPPGWAPLVQKKFILFGCASKITSEVRVLPFDQPEGTPEVLIPRAEGVEYDVDHAVVDGSDIWLVTHNAEGPNFSVGWAGVDKLNSLDALAPLVAHKDDVRIEGVDTYRDFIILGYRSGAIGQVAIMKLIDGTFGDFQQLEFDEEIYTVASGGNPEWDAPVIRLSYGSFTTPAQLFNYWIESGERTLLKQQEVLGGYKPSDYVASRLWVTAKDGAQIPVSLVHRTDLDVSKPNPTLLYGYGSYESSIDPGFSIARLSLMDRGMIFAIAHVRGGGEMGRGWYDNGKTTTKKNTFTDFIDVADALIEQKISAPEMLVAEGGSAGGMLMGAIANMAGDRFKAIEANVPFVDPLTSMLMPELPLTVIEWDEWGDPLHDKDVYEYMASYAPYENIEAKNYPNILAVTSLNDTRVLYVEPAKWVAQLRATATGGEFLLKTEMVAGHGGVSGRYEKWRETAFEYGWLINQATGVTE

SEQ ID NO: 199 - DNA, 1539 bp, Corynebacterium glutamicum; identical to SEQ ID NO: 197
  CDS (101)..(1516): FRXA00622

SEQ ID NO: 200 - protein, 472 aa, Corynebacterium glutamicum; identical to SEQ ID NO: 198

SEQ ID NO: 201 - DNA, 750 bp, Corynebacterium glutamicum
  CDS (101)..(727): RXN02146
ggttctctcgcagagagagaaggagtggggataggggccttccgctccgaacccgacagctaactcggtcagcaaacaggaagaatttggagtttcatcagtgggtaagcaccgtcgcaacaattcaaacgcaactcgcaaggctgtagcagcatctgcagttgcgcttggagcaaccgcagctatcgcctccccagcacaggcagctgaggttgttgttcctggcaccggaatcagcgttgacatcgctggcatcgagaccactccaggtcttaacaacgttccaggaatcgatcagtggatcccttcccttagcagccaggcagctcctactgcttacgcagccgtcattgatgcacctgcagcacaggctgcacctgcagcaagcaccggtcaggcaatcgttgatgcagcgcgcaccaagattggttccccatacggttggggtgctaccggtcctaacgctttcgactgctccggccttacctcatgggcatacagccaggttggcaagtccatcccacgtacctcccaggctcaggctgcacagggcacccctgttgcttactctgaccttcaggctggcgacatcgttgcgttctactccggcgctacccacgttggtatctactccggccacggcaccgttatccacgcactgaacagcagcacccctctgtctgagcactccttggattacatgccattccactctgcagttcgtttctaatctgcataaagtcttaagct

SEQ ID NO: 202 - protein, 209 aa, Corynebacterium glutamicum
VGKHRRNNSNATRKAVAASAVALGATAAIASPAQAAEVVVPGTGISVDIAGIETTPGLNNVPGIDQWIPSLSSQAAPTAYAAVIDAPAAQAAPAASTGQAIVDAARTKIGSPYGWGATGPNAFDCSGLTSWAYSQVGKSIPRTSQAQAAQGTPVAYSDLQAGDIVAFYSGATHVGIYSGHGTVIHALNSSTPLSEHSLDYMPFHSAVRF

SEQ ID NO: 203 - DNA, 807 bp, Corynebacterium glutamicum
  CDS (101)..(784): RXN03133
ggcgtcaagcacgcactccaccacatcgatcttcgccccgccctcgaatgggacatcatgggatttcccgaatcccccgacacgctgcccattttgctcagtgacctgcgcgaccccccttacgccaccactgctgtgccacctcaatccacgccacgctccgctcaccgatccacacattgacgcttccaggcgccaccgcggtcccttccacgccactcccagctacgcaggctttcacccctcatttaccgacgacaccgcccgcatgctgggcaacctagccaaaattggcgcggttgccacctgggaaaagacgcttgtcgacgccgcaagctgggccgaactcccccacccaccagtcatcgtcggggataccccgccctcgactgtcacgccggacaacgcctggtaccagtttcgcgtcggcaagcatcttggtcgcgatgcgttcgcggaaatcgtcatgtgccttggccacgtgttttgccatcatgtcccccaggtatggtcgacaacctgcgcatctcaggacgctgattccaccacgatgctcattgaagccgagaccgcgggggcattggccatcgctcgcgtcggcggcccgacccgtcgaggtggttccttcttcggcgatgcccttctcaaagaggggacgccacttcctgctggtttccgactagatgttgttctacacgccgcctcagaaattgaggatctgctgcgcggtgacaccacagccgttgtcagcggcgcttggtctgtggaggatcgccgaggttactaacaaataggcccaacaaagag

SEQ ID NO: 204 - protein, 228 aa, Corynebacterium glutamicum
VTCATPLTPPLLCHLNPRHAPLTDPHIDASRRHRGPFHATPSYAGFHPSFTDDTARMLGNLAKIGAVATWEKTLVDAASWAELPHPPVIVGDTPPSTVTPDNAWYQFRVGKHLGRDAFAEIVMCLGHVFCHHVPQVWSTTCASQDADSTTMLIEAETAGALAIARVGGPTRRGGSFFGDALLKEGTPLPAGFRLDVVLHAASEIEDLLRGDTTAVVSGAWSVEDRRGY

SEQ ID NO: 205 - DNA, 1411 bp, Corynebacterium glutamicum
  CDS (101)..(1411): RXN02820
caacgaaacaaatgcaagcccccaatcatgggtttctaccaattaaattttctttcagaaaatatctccccacataaaagttccttgataggctcgagagatgaaagtgacccaaagcacattccttaaatcggtagctgcgttcactgtcgcagccttaaccctgaccatctcttcgtgttccagcggtgaagacacctccgcaagctccacggatactgaaaactcctcaacccaagcagcagcgtctcccccacttgcgccttgtgaacttcccgccgacgcttctgctgaagaggaagtagaaggcactcacacaggtgaagatatttctgttgccccggaaatcggtaccggctaccgcgagggcatgacccctgttcaaacccaaggttatgcggtggcaactgcaaaccccatcgcttctgaagcagcctgcgcggtgttaagagaaggcggcactgcagctgatgctcttgtcaccgcgcagtttgttttgggactgacggaaccgcagtcgtctggccttggtggtggcggatacattctgtactacgacgccgaagccaatgcggtgacagccattgatggccgtgaaacagcgccagttgctgctgatgaaaactatctcattcatgtttctgcagaggatcaaacggcacctgttcctgatgcccgacgttccggcaggtcaattggtgtgccaggaatcgtggcagcccttggacagctgcatgattcattcggaaagacctcctggcaggacgtgctgacaactccgcagcagctcgcaactgatggtttttccatcagccctcgcatgtcagcatcaattgctaactccgctgaggatctctcccacgatccggaagctgccgcatatttccttgatgaaaacggtgatgcgaaggcacccggcacacttttacaaaaccctgactatgcagaaacgattcgtctcatctctgaaggtggccccgatgcgttctacacgggtgagattgcagcagacatcgtggaacgcgccacccgtgaggttgacggtttcacaccatcactgatgagcacggcagatttggctgcctacactccggaaactcgtgaagctttgtgtgctccctaccgcgacaagattgtttgtggcatgccaccgtcatcatcgggtggcgtcacagtgatggaaaccctgggtatcttgaacaactttgatctcgcccaatacccacccactgaggttggtttggatggcggattgccaaatgcggaagctgttcacctgatttcagaggctgagcgcctggcttatgctgatcgcgatgcttacatcggtgatcctgctttcgtggaagttccagcaggtggtgtccaacagtggatcaaccatgtccacacgggcgaacactccaaactt

SEQ ID NO: 206 - protein, 437 aa, Corynebacterium glutamicum
MKVTQSTFLKSVAAFTVAALTLTISSCSSGEDTSASSTDTENSSTQAAASPPLAPCELPADASAEEEVEGTHTGEDISVAPEIGTGYREGMTPVQTQGYAVATANPIASEAACAVLREGGTAADALVTAQFVLGLTEPQSSGLGGGGYILYYDAEANAVTAIDGRETAPVAADENYLIHVSAEDQTAPVPDARRSGRSIGVPGIVAALGQLHDSFGKTSWQDVLTTPQQLATDGFSISPRMSASIANSAEDLSHDPEAAAYFLDENGDAKAPGTLLQNPDYAETIRLISEGGPDAFYTGEIAADIVERATREVDGFTPSLMSTADLAAYTPETREALCAPYRDKIVCGMPPSSSGGVTVMETLGILNNFDLAQYPPTEVGLDGGLPNAEAVHLISEAERLAYADRDAYIGDPAFVEVPAGGVQQWINHVHTGEHSKL

SEQ ID NO: 207 - DNA, 507 bp, Corynebacterium glutamicum
  CDS (1)..(507): FRXA02820
gctaactccgctgaggatctctcccacgatccggaagctgccgcatatttccttgatgaaaacggtgatgcgaaggcacccggcacacttttacaaaaccctgactatgcagaaacgattcgtctcatctctgaaggtggccccgatgcgttctacacgggtgagattgcagcagacatcgtggaacgcgccacccgtgaggttgacggtttcacaccatcactgatgagcacggcagatttggctgcctacactccggaaactcgtgaagctttgtgtgctccctaccgcgacaagattgtttgtggcatgccaccgtcatcatcgggtggcgtcacagtgatggaaaccctgggtatcttgaacaactttgatctcgcccaatacccacccactgaggttggtttggatggcggattgccaaatgcggaagctgttcacctgatttcagaggctgagcgcctggcttatgctgatcgcgatgcttacatcggtgatcctgctttc

SEQ ID NO: 208 - protein, 169 aa, Corynebacterium glutamicum
ANSAEDLSHDPEAAAYFLDENGDAKAPGTLLQNPDYAETIRLISEGGPDAFYTGEIAADIVERATREVDGFTPSLMSTADLAAYTPETREALCAPYRDKIVCGMPPSSSGGVTVMETLGILNNFDLAQYPPTEVGLDGGLPNAEAVHLISEAERLAYADRDAYIGDPAF

SEQ ID NO: 209 - DNA, 604 bp, Corynebacterium glutamicum
  CDS (101)..(604): FRXA02000
caacgaaacaaatgcaagcccccaatcatgggtttctaccaattaaattttctttcagaaaatatctccccacataaaagttccttgataggctcgagagatgaaagtgacccaaagcacattccttaaatcggtagctgcgttcactgtcgcagccttaaccctgaccatctcttcgtgttccagcggtgaagacacctccgcaagctccacggatactgaaaactcctcaacccaagcagcagcgtctcccccacttgcgccttgtgaacttcccgccgacgcttctgctgaagaggaagtagaaggcactcacacaggtgaagatatttctgttgccccggaaatcggtaccggctaccgcgagggcatgacccctgttcaaacccaaggttatgcggtggcaactgcaaaccccatcgcttctgaagcagcctgcgcggtgttaagagaaggcggcactgcagctgatgctcttgtcaccgcgcagtttgttttgggactgacggaaccgcagtcgtctggccttggtggtggcggatacattctgtactacgacgccgaagccaatgcggtgacagccattgatggccgtgaaacagcg

SEQ ID NO: 210 - protein, 168 aa, Corynebacterium glutamicum
MKVTQSTFLKSVAAFTVAALTLTISSCSSGEDTSASSTDTENSSTQAAASPPLAPCELPADASAEEEVEGTHTGEDISVAPEIGTGYREGMTPVQTQGYAVATANPIASEAACAVLREGGTAADALVTAQFVLGLTEPQSSGLGGGGYILYYDAEANAVTAIDGRETA

SEQ ID NO: 211 - DNA, 753 bp, Corynebacterium glutamicum
  CDS (53)..(730): RXN02944
ggggaggtcccaacaggtggtggcgaagaggtgaccagcgaggtcaacaggggtgaacgctcagaatcttattgatccagagcattcaatgggtcaggcaactgctggtgtgagccagaacccagtcatggctgccctgccggaaagtggcaccagccatatttccatcatcgattcctatggcaacgcagcatcgttgaccaccagtgtggaagctgctttcggttccttccacttcacccgtggtttcattttgaataatcagctgacagatttctccgctgaaccacttgatgaggacggcgagcccgtggccaatcgtgtcgagtcagcaaagcgcccacggtcttccatgtcgccaatgctagtgttcaacgccagtggcgatggtgaaatcgcggatctgaatatggtgctgggctcccctggcggatccttgattattcagtacgtggtgaaaaccctggtcaacatcatcgactgggatatggatccacagcaggcagtgtctgcgcccaactttggtgcgatgaaccagcctaagactggactgggaagcgagcatccgctgatcgccaatgattcagcagagcttgtatctgaactggaaagcaaaggccacgaagttaatgtgggcgagcaatccagtggcctatcggcgttggtgaaaaacggcgacaccattgtcggtggcgccgatccacgtagagaaggcgtggtcttgggtggctaattagcgcgcagaccacgcag

SEQ ID NO: 212 - protein, 226 aa, Corynebacterium glutamicum
VNAQNLIDPEHSMGQATAGVSQNPVMAALPESGTSHISIIDSYGNAASLTTSVEAAFGSFHFTRGFILNNQLTDFSAEPLDEDGEPVANRVESAKRPRSSMSPMLVFNASGDGEIADLNMVLGSPGGSLIIQYVVKTLVNIIDWDMDPQQAVSAPNFGAMNQPKTGLGSEHPLIANDSAELVSELESKGHEVNVGEQSSGLSALVKNGDTIVGGADPRREGVVLGG

SEQ ID NO: 213 - DNA, 1335 bp, Corynebacterium glutamicum
  CDS (101)..(1312): RXS00197
gtcgatgatattttggcaaccgaatctgaggcacgcgcgcgtgcgaatgctttgatcaaccggttggcaaccaacttgtaagctaaggagcttccgcctcgtggcagcctatcttcttggtgtcgtattatttttcctcggcatcgcagtaaccatcgcgcttcacgagtgggggcacttcatcacagcgcgcattttcggaatgaaagtgcggcgtttcttcatcggtttcggcccgacggtgtttgccaaaagacgcggcgaaaccgtgtacggccttaaagcgattccggtcggcggtttttgtgacatcgcggggatgactgcccaagatgaacttgatccggaagacctgccgcgcgccatgtatctaaagccctggtggcagcgcataattgtgctttccggcggcgtgatcatgaatctgatcgtcggctttttggtgctttacggcgtggcggtgagctccggaatcccgaatccggatgtggataccaccgcgacagtcgacaccgttcagtgcgtgccggaaacccaaatttccgcaactgaactgtcctcctgcgtaggttcaggcccagcgggcgacgccggcattgagcacggcgataagattttggccgtcaacggccaagagatggcaagcttcaccgccatccgcgatgcgatcctcgagctcccaggcgaaacggcaacgctgacgattgaacgggagggaacgcttttcgacgtcgacctccaggttgcctctgtcacccgtctcgcctctgacggttcagaaattaccgtcggcgcggtgggcatgtcgagccttccaccgaccgatgtgtacaaaaaatacggcccaatcgagggtgtgggagcaactgcacgtttcaccggcgacatgatcagcgccacgtgggatggcctcaaagccttcccggcgaaaatcccaggggtcgtcgcatccatcttcggtgcagaacgagatgtagaaagccccatgagtgtggtgggcgccgtacgcatcggcggcgaatttgtcgaacgttccatgtgggacatgttcatgatgatgctggccagcctgaacttcttcctcgcgctgtttaacctcgtgccgctgccaccacttgatggcggacacattgccgtggtgatctatgaaaaaatccgcgacttcttccgcaaactgcgcggaaaaccagcgggcggcccagcggattacaccaaactaatgcccgtcaccgtagctgtcgcagccttgctgatgacagtgggaggcctggtcattgtcgccgatgtggtcaatcccatccgactctttggctaacgatacggaattgaactgcc

SEQ ID NO: 214 - protein, 404 aa, Corynebacterium glutamicum
VAAYLLGVVLFFLGIAVTIALHEWGHFITARIFGMKVRRFFIGFGPTVFAKRRGETVYGLKAIPVGGFCDIAGMTAQDELDPEDLPRAMYLKPWWQRIIVLSGGVIMNLIVGFLVLYGVAVSSGIPNPDVDTTATVDTVQCVPETQISATELSSCVGSGPAGDAGIEHGDKILAVNGQEMASFTAIRDAILELPGETATLTIEREGTLFDVDLQVASVTRLASDGSEITVGAVGMSSLPPTDVYKKYGPIEGVGATARFTGDMISATWDGLKAFPAKIPGVVASIFGAERDVESPMSVVGAVRIGGEFVERSMWDMFMMMLASLNFFLALFNLVPLPPLDGGHIAVVIYEKIRDFFRKLRGKPAGGPADYTKLMPVTVAVAALLMTVGGLVIVADVVNPIRLFG

SEQ ID NO: 215 - DNA, 735 bp, Corynebacterium glutamicum
  CDS (101)..(712): RXS01223
gcgggagtggacgggccgccagccatcggggcgacaatcacgggagttttcaacgtgtcaaggatgctcatggcaccatcctaggcgcgcctgccataggatgacttccgtgagttttttgtctaaaatccaagcactgtttgcccccaagcctgaacttcccgccgccaaatggctggtcgtgggcctgggcaaccccggcgccaagtacgaatccacccgacacaacgtcggttacatgtgccaagacatgcttatcgacgcccaccagcagcagcccctcacccccgccacgggctacaaggccctcacaacgcagctcgcaccaggggtgctcgccgttcgatccaccacttttatgaaccactccggccaaggtgtcgcaccgatcgccgcagcgttgggtatcccagcagagcgcatcatcgtgatccacgacgagctcgatctgcccgctggaaaagtacgcctgaaaaagggcggaaacgaaaacggtcacaacggcctgaaatccctcacggaagagctcggcaccagagactacctgcgcgtccgcatcggcatttcacgaccaccagcaggaatggccgtgcccgactacgttttggaaccagtcgatcacgaccaaccaggcattgaacttgccgccgaggcagtggatttgctgctggcccagggattatctgctgcgcaaaacgctatccacagccgctagattgctagagattcccgcac

SEQ ID NO: 216 - protein, 204 aa, Corynebacterium glutamicum
MTSVSFLSKIQALFAPKPELPAAKWLVVGLGNPGAKYESTRHNVGYMCQDMLIDAHQQQPLTPATGYKALTTQLAPGVLAVRSTTFMNHSGQGVAPIAAALGIPAERIIVIHDELDLPAGKVRLKKGGNENGHNGLKSLTEELGTRDYLRVRIGISRPPAGMAVPDYVLEPVDHDQPGIELAAEAVDLLLAQGLSAAQNAIHSR

SEQ ID NO: 217 - DNA, 1365 bp, Corynebacterium glutamicum
  CDS (101)..(1342): RXS01642
ttggaatcactgtgtcttgcagctagtctgccactcgcactgcatttgctggatgtatttggaatgctgcgcggtcttgatattggattcggtggataagatgcgcagactcatcgcggttagcttggccgctctgtttatgttggcttccactccagcgacgagggcacaggaagtagaagctctcgcttgccccgaggtagcgatcgccgatccttcctccgcagttttagatgaacacctttcgcagtcattatcccaagctcaccaactagcaactggcgccggtgtgatggtggcagtcatcgacaccggagtatccctgcatccacgtctgccccacttaattcccggcggtgatttcgtgggcgcccaccaaagccccgatgtgccaggtgaacttatcgattgcgacggccacggcaccatcgtcgccggaatcatcgcctcccaaggaaaccccggcaccggctggccatatgacggcagctccgatccttatatcggtgtcgccccagattccggaatcatctccattaaacaaaccagctcatatgtgcgtactcgtgaagattccaacgtcggaacgctgagcaccctggcggaatccatccaccgagctctcgattccggtgcccacgtgatcaatatttccgtggtgtcctgtttgccccaatcacccgacgaggccgcatcgttccagcctctgacggatgctcttaacagagcagaacttcaaggggtgatagtggtggcagcagcaggaaacctcgggcaggattgtccagttggatctaccgtttatcctgcacattcagacactgtgctctctgtgtcggcacgttttgattctcacacgcttgcagaatattccatgcctggcaaccaacaaatcctctctgcaccaagccacattcaggctggtctatcaccgcgtggcgacggcttcgccagccacatgatcaccaccgctggcgaaagccccttcgagggcaccagttttgccgctccagttgtcagcgccacagctgcactgcttcgccagcattttccctttgccacaccctatgaaattcgtgcacgaatcttcaacagcatcgaccctgcaagaggcgctattgatccctacctggcacttactcaagaaatctatcccaccactcccctggttcatgagatcgcactaagtgttcccacgccgccggatgattctccacgggagcggggcatcctagttaccgcaatcattgttgggttgctcgcagtgttagctgtgctgatgggactacgccgaattcatcatcactcggcctttcaaaaagctagctcaagtgttatcacttaatctatgaggcaccgttcaga

SEQ ID NO: 218 - protein, 414 aa, Corynebacterium glutamicum
MRRLIAVSLAALFMLASTPATRAQEVEALACPEVAIADPSSAVLDEHLSQSLSQAHQLATGAGVMVAVIDTGVSLHPRLPHLIPGGDFVGAHQSPDVPGELIDCDGHGTIVAGIIASQGNPGTGWPYDGSSDPYIGVAPDSGIISIKQTSSYVRTREDSNVGTLSTLAESIHRALDSGAHVINISVVSCLPQSPDEAASFQPLTDALNRAELQGVIVVAAAGNLGQDCPVGSTVYPAHSDTVLSVSARFDSHTLAEYSMPGNQQILSAPSHIQAGLSPRGDGFASHMITTAGESPFEGTSFAAPVVSATAALLRQHFPFATPYEIRARIFNSIDPARGAIDPYLALTQEIYPTTPLVHEIALSVPTPPDDSPRERGILVTAIIVGLLAVLAVLMGLRRIHHHSAFQKASSSVIT

SEQ ID NO: 219 - DNA, 1098 bp, Corynebacterium glutamicum
  CDS (101)..(1075): RXA01728
gaatcgccggaccttgaaatggacccggtttccagaagacgtgcttcctttgtgggttgcggaaagtgattttggcacctgcccgcagttgaaggaagctatggcagatgccgttgagcgcgaggtcttcggatacccaccagatgctactgggttgaatgatgcgttgactggattctacgagcgtcgctatgggtttggcccaaatccggaaagtgttttcgccattccggatgtggttcgtggcctgaagcttgccattgagcatttcactaagcctggttcggcgatcattgtgccgttgcctgcataccctcctttcattgagttgcctaaggtgactggtcgtcaggcgatctacattgatgcgcatgagtacgatttgaaggaaattgagaaggccttcgctgacggtgcgggatcactgttgttctgcaatccacacaacccactgggcacggtcttttctgaagagtacatccgcgagctcaccgatattgcggcgaagtacgatgcccgcatcatcgtcgatgagatccacgcgccactggtttatgaaggcacccatgtggttgctgctggtgtttctgagaacgctgcaaacacttgcatcaccatcaccgcaacttctaaggcgtggaacactgctggtttgaagtgtgctcagatcttcttcagtaatgaagccgatgtgaaggcctggaagaatttgtcggatattacccgtgacggtgtgtccatccttggattgatcgctgcggagacagtgtacaacgagggcgaagaattccttgatgagtcaattcagattctcaaggacaaccgtgactttgcggctgctgaactggaaaagcttggcgtgaaggtctacgcaccggactccacttatttgatgtggttggacttcgctggcaccaagatcgaagaggcgccttctaaaattcttcgtgaggagggtaaggtcatgctgaatgatggcgcagcttttggtggtttcaccacctgcgctcgtcttaattttgcgtgttccagagagacccttgaggaggggctgcgccgtatcgccagcgtgttgtaaataatgagtaaaaagtctgt

SEQ ID NO: 220 - protein, 325 aa, Corynebacterium glutamicum
MADAVEREVFGYPPDATGLNDALTGFYERRYGFGPNPESVFAIPDVVRGLKLAIEHFTKPGSAIIVPLPAYPPFIELPKVTGRQAIYIDAHEYDLKEIEKAFADGAGSLLFCNPHNPLGTVFSEEYIRELTDIAAKYDARIIVDEIHAPLVYEGTHVVAAGVSENAANTCITITATSKAWNTAGLKCAQIFFSNEADVKAWKNLSDITRDGVSILGLIAAETVYNEGEEFLDESIQILKDNRDFAAAELEKLGVKVYAPDSTYLMWLDFAGTKIEEAPSKILREEGKVMLNDGAAFGGFTTCARLNFACSRETLEEGLRRIASVL

SEQ ID NO: 221 - DNA, 732 bp, Corynebacterium glutamicum
  CDS (101)..(709): RXA02214
gaactcaattccctgagctgtaatgaaaggacattggtatggggttgcctctgacatcgtttgagctctccatccttttcatttcgctattctggtatccatgagtcccaccgttttgcctgctacacaagctgacttccctaagatcgtcgatgttctggttgaagcattcgccaacgatccagcatttttacgatggatcccgcagccggaccccggttcagcaaagcttcgagcacttttcgaactgcagattgagaagcagtatgcagtggcgggaaatattgatgtcgcgcgtgattctgagggagaaatcgtcggcgtcgcgttatgggatcggccagatggtaatcacagtgccaaagatcaagcagcgatgctcccccggctcgtctccattttcgggatcaaggctgcacacgtggcgtggacggatttgagttcggctcgtttccaccccaaattcccccattggtacctctacaccgtggcaacatctagctctgcccgtggaacggatgttggcagtgcgcttcttaatcacggaatcgctcgcgcggctgatgaagctatctatttggaggcgacgccgactcgtgcggctcaactatataaccgtctgggattcgtgcccttgggttatatcccctcagatgatgatggcactcctgaactggcgatgtggaaaccgccagcgatgccaactgtttaaccctgaaggcgatttaaggg

SEQ ID NO: 222 - protein, 203 aa, Corynebacterium glutamicum
MSPTVLPATQADFPKIVDVLVEAFANDPAFLRWIPQPDPGSAKLRALFELQIEKQYAVAGNIDVARDSEGEIVGVALWDRPDGNHSAKDQAAMLPRLVSIFGIKAAHVAWTDLSSARFHPKFPHWYLYTVATSSSARGTDVGSALLNHGIARAADEAIYLEATPTRAAQLYNRLGFVPLGYIPSDDDGTPELAMWKPPAMPTV

SEQ ID NO: 223 - DNA, 684 bp, Corynebacterium glutamicum
  CDS (101)..(661): RXA02716
aatggattttggggtgtaaactacttcagttcggccgattcctgcatagatttctgcggaacacccaactcacatcaccacttctggtttgatggggagcgtgtcaccgatcattcgtaaattgagtatccccgagttcaccaccaacaccccagtgttggtggatatctacatcgcagcgatgaactatgacaaagcaatcagggatacccggatcgaagtctggcggagaaactcccagaaccccggattcacagcagtggcagcgctgatggatgatcaggtcgtgggcgtggcctatggcttcaatggcagcccagatcattggtggcaacaccaattacgccggggactccgacaacaaggaggcccgacggaagaggaaatccatatcatccacaactactttgaggttgcggaagttcatgttcagcctggcttccaaggtcacggcattggccgaaagctgatgcatgaactgttaaaagacaaacaaaacacttttgccattttgtctacacccgaggtcgacgatgaggcgaaccatgcgtttagcctgtatcgctctctcggcttcactgacttgctcaggcagtttaggtttgacggggatcaacggccgtttgccgtattgatcaccgccctcccccttcatgattcctaagagggcttaacgcaccgcgt

SEQ ID NO: 224 - protein, 187 aa, Corynebacterium glutamicum
VSPIIRKLSIPEFTTNTPVLVDIYIAAMNYDKAIRDTRIEVWRRNSQNPGFTAVAALMDDQVVGVAYGFNGSPDHWWQHQLRRGLRQQGGPTEEEIHIIHNYFEVAEVHVQPGFQGHGIGRKLMHELLKDKQNTFAILSTPEVDDEANHAFSLYRSLGFTDLLRQFRFDGDQRPFAVLITALPLHDS

SEQ ID NO: 225 - DNA, 3945 bp, Corynebacterium glutamicum
  CDS (101)..(3922): RXN01499
gcagcaattatctccaccgaagaggactaaatataacgtggcattgagcagtgttccagcacagttcctgagatccgcccaggcgcccccgaagcgtactttgtgggacgtcttagaatccgtcgcctctacttatcctgaggcagcagctattgacgatggccaggtgttgacctacgcagagttgatggaagaagtcaccgcgttggctgattccattcatgcacagggcattcgccgtggtgatcgcatcggtattcgcatgccgtctggtacgcgtgacctttacatcgctattttggccactctcgctgctggtgctgcttacgtgccagttgatgcagatgatcctgaagagcgcgccgagatggtgtttggtgaagcaaatattaatgcgcttttcgacgccaccggcttccatatgcttcgcccgaccgcgggcggcgatacccgtagaccacgcttggatgatacggcgtggattatctttacttccggttccaccggcaagcctaagggtgtggctgtgtcccaccgttcagctgcggctttcgtggatgccgaagcacaaatgttccttgtcgatcacccttccggcccccttggcccagaagaccgagtccttgcgggattgtctgtagcctttgacgcatcttgtgaggaaatgtggttggcctggggccacggcgcctgcttggtgccagcaccacgctccctagtccgttccggtatggacttgggcccatggctgattcgccgcgacatcagtgtcgtctccaccgtcccaactctggctggtctgtggccagcagaagcattgtcacaggtccgcttgctcatcgtcggcggcgaggcttgctcgcaggagctcgttgaacgcttatcgacgcctgaccgcgaggtgtggaacacttacggccccaccgaagcaacggtggttgcctgtggcactcaactctatgctggtcagccagtgggcattggtttgccacttgctggttgggatcttgttgttgtcgacgatgccggcgaacctgtcggaatcggcgaggtcggcgaattggtcatcggtggtgtgggtcttgcacgctaccttgatccagaaaaagaccgcgagaagtatgcgccactgaagtctgttggttggacccgcgcttatcgttccggtgaccacgttcgtctggaagaagatggcctctactttgtgggccgcgttgatgatcaggtgaaaatcggcggtcgacgcatcgagctcggtgaagttgatgccaatgtggcagcgctttccaacgttcgttcctccgcagtggttgttcagaccactggtgcggatcaaaaagttctggttgcatacgtttctttggaagatgctgcagctggatttgatcacaacgtcgcgactgcccgactcaccgaaaccatgcctgctgctttggttccgcgcattcacgtgatggatgatctgcctgtcaccacctccggcaaggttgataagaagtctttgccgtggcctcttcctggcaccgtggtggaagctaatgacctcagcgcaacggaagcgtggattgctcaggaatgggtcgatatcctcggcacttctgtgagcagcaaagacgccgacttcttctcccttggcggtacctctctcgcggctgcgactttggttggccgggtacgcgcaaaggttcccaccgctgcggtgcgtgatctttacgatcaccctcgcttggagaaattcgccgagcgtgtcgaggctatcgccgccgacactggcatttctttggaggcgccaaaccaggtggaggagcgcgtcgtcaagcctgtttcttttggcactcgtgtgatgcagaccctcatccagattccgatcatgacgctgcaagcagcacagtggattgcatggttgctgttgggcaacaacatcatggcagcgcttgatttcgattgggctgttcatgtctcctggtggcttgtcatcggcatgattttggtgttcgctaccccgattggtcgcttgccgatcggcggttggggcgcccgcatcatcacccgtggcataactcctggctcctaccctcgtggcggttccactcacctgcgcatttggtccgccgagcgccttgctgatgcctctggctctcgcaatatttctggcgcaacctgggtgaactacttcgcgcgttccctgggtgtgaagatgggcaagggcgtggatcttcactccctgccaccaatcactggccttttgaccttgggcaacaatgtttccatcgagcaagaagttgaccttcgtggctactggctcgacggcgatatcctgcgtgtaggcaccattgaggtccatgacaacgctcgcatcggcgctcgttccaccctgcttcccggcaccgtggtgggcaccggcgctcacctgctgcctggttcaacagtgactggtgataagaccatcaagcctggttctcgttgggctggctcccctgcacaaaaggtgggtcgtgcaaagcaccggttcccaacctcccatcctccacgcaggtcccggtgggttccggtgttcggcgcgacctccatcgtgttgtcgctgctgccacttcaggctctcgctattggcgctgctatcaccttgtggctggccacgattagcccgcttccactgatctggggtgtgctggtttttgctaccgtcggcgcgttggctgcgttctttgcttacaccgtgaccatctgggtgcttgtccgtttgatccagatcggcatcaagggcggcaccgcaccagtgaggtcccgtcttggttggcaggtctgggcagttcaacgcctcatggacgatgcccgcacctatctcttcccgctctacgcatcccaactgaccccactgtggttccgcagcttgggcgcgaagatcggcaaggatgttgagatctccaccgcggtgatggttcctaaactggctgatatccgcgaaggcgcattcctggccgatgacaccctcatcggtggctatgagctgggtaatggttggctgctcagtggtgaaacccgcgtgggtaagcgttccttcattggtaactctggcatcgcaggacctgagcgcaagctcgctaagaactccctggttgcagtgctctcctccaccccgaagaaggctaaggccaactccaactggtggggttcccctccagagcgcatgcgtcgtgtcactgtcgaagttgatgagggcgaagcaaagacctacagccctggctttggtgtgaagtttgcacgtggcgcggtggaaaccgcacgtctgcttgctccaataacctctggtgtgttggctgcgctgtcactgctgctcatgcagtacctgctcactgagttcaacatgtggatcacctggttgcttggcggactgatcctcatgacggttggtgtgctcgccatgggcattacggttgtgatgaagtgggtttgcgtcggcaagcataagccgtctgagcaccctctcttcagccgctttgtgtggctgaatgagctgcaagatgcgttcgtggaatccgtggctggcccatggttcctcgtgcccaacctgggcaccggcgcgctgaacgccggcatgagcgcgcttggcgcacacatcggccgtggcgcatggatcgaatcctactggctgccggaaaccgacctctgctacatcggcaagggcgcaaccgtgggccctggcgtggtcgtgcagacccacctcttccaggaccgcgtgatgagcctagatacggtgaccgtcgctgacggcgccaccctagcggaccactccgttgcccttcctgcttcgcttatcgacgcctccgccaccatcggcccaggctcgctggtgatgcgcggcgacaaggtaccagcgcatacccgctggcaaggcaacccaattgagccgtggagcaactcttaaataacaacaatcagccggat

SEQ ID NO: 226 - protein, 1274 aa, Corynebacterium glutamicum
LWDVLESVASTYPEAAAIDDGQVLTYAELMEEVTALADSIHAQGIRRGDRIGIRMPSGTRDLYIAILATLAAGAAYVPVDADDPEERAEMVFGEANINALFDATGFHMLRPTAGGDTRRPRLDDTAWIIFTSGSTGKPKGVAVSHRSAAAFVDAEAQMFLVDHPSGPLGPEDRVLAGLSVAFDASCEEMWLAWGHGACLVPAPRSLVRSGMDLGPWLIRRDISVVSTVPTLAGLWPAEALSQVRLLIVGGEACSQELVERLSTPDREVWNTYGPTEATVVACGTQLYAGQPVGIGLPLAGWDLVVVDDAGEPVGIGEVGELVIGGVGLARYLDPEKDREKYAPLKSVGWTRAYRSGDHVRLEEDGLYFVGRVDDQVKIGGRRIELGEVDANVAALSNVRSSAVVVQTTGADQKVLVAYVSLEDAAAGFDHNVATARLTETMPAALVPRIHVMDDLPVTTSGKVDKKSLPWPLPGTVVEANDLSATEAWIAQEWVDILGTSVSSKDADFFSLGGTSLAAATLVGRVRAKVPTAAVRDLYDHPRLEKFAERVEAIAADTGISLEAPNQVEERVVKPVSFGTRVMQTLIQIPIMTLQAAQWIAWLLLGNNIMAALDFDWAVHVSWWLVIGMILVFATPIGRLPIGGWGARIITRGITPGSYPRGGSTHLRIWSAERLADASGSRNISGATWVNYFARSLGVKMGKGVDLHSLPPITGLLTLGNNVSIEQEVDLRGYWLDGDILRVGTIEVHDNARIGARSTLLPGTVVGTGAHLLPGSTVTGDKTIKPGSRWAGSPAQKVGRAKHRFPTSHPPRRSRWVPVFGATSIVLSLLPLQALAIGAAITLWLATISPLPLIWGVLVFATVGALAAFFAYTVTIWVLVRLIQIGIKGGTAPVRSRLGWQVWAVQRLMDDARTYLFPLYASQLTPLWFRSLGAKIGKDVEISTAVMVPKLADIREGAFLADDTLIGGYELGNGWLLSGETRVGKRSFIGNSGIAGPERKLAKNSLVAVLSSTPKKAKANSNWWGSPPERMRRVTVEVDEGEAKTYSPGFGVKFARGAVETARLLAPITSGVLAALSLLLMQYLLTEFNMWITWLLGGLILMTVGVLAMGITVVMKWVCVGKHKPSEHPLFSRFVWLNELQDAFVESVAGPWFLVPNLGTGALNAGMSALGAHIGRGAWIESYWLPETDLCYIGKGATVGPGVVVQTHLFQDRVMSLDTVTVADGATLADHSVALPASLIDASATIGPGSLVMRGDKVPAHTRWQGNPIEPWSNS

SEQ ID NO: 227 - DNA, 3945 bp, Corynebacterium glutamicum; identical to SEQ ID NO: 225
  CDS (101)..(3922): FRXA01499

SEQ ID NO: 228 - protein, 1274 aa, Corynebacterium glutamicum; identical to SEQ ID NO: 226

SEQ ID NO: 229 - DNA, 2025 bp, Corynebacterium glutamicum
  CDS (101)..(2002): RXN00787
ccagcccgcccaataaataatttctctcttctaattgcggagcctcatatattgagtacggtattttgaaacaccttcagccccctttttaggagccacagtgtctcagcctctcagcaagcgtctcagcatacgaaaagcactcgccagcgccttcatagttgcgctggcgttttcgctttccccagtagccaaagcccaagccaatgaaactccgacgatgatcgtgttggacaattcaggctccatgacagctcaagatgccggcggacagacccgtatcgatgcagcaaaacaagcctccactcagttaattaatgacatctccgaccgcaccgacgtaggtctgacctactacggcggaaacaccggcgaaacagaagcagacgttgagatgggatgccaagacgtcaccatccttggcggcccctcccgaggaaatgcagacaccttaattgacacgatcaacagcctgcagcctcgaggcttcacccccatcggcaaagcactcaccgataccgccgccgagctccccgaaggcggaaacattgtgttggtctccgatggcatcgccaactgcaccccaccggatgtctgcgaagtagcccaagaactggctcaaagtggaatcaacctggttatcaacaccatcggactaaatgttgatccagcagcgcgcgaagaactggagtgcatcgctggagtcggtggtggcacttacgcggatgcttccgacgcgcagagccttaccgatgcgctgacacgagccgccagtaggcaatacaactcttacacctccgatgtgacaaaaattgatggggcatcggaacaaagcgcagccgtagaaattgatgaggatacagaactattcctcaccgacctgccacaagaatcccgcttttggaaaatccctgtagagccaggtgaaaccatctcagtttctgccaacacagttaccgacccaacagtactcaccatggggcaaggcggaatcaagcttgaagcccaactccatactgaagaggctccacaatacggcctgcgtggtcggtgcactcgggtctcatttgataatttcaagcccggccttggtgtacgcggaatccaaaacgcgtccgttgcatcaaaagaagtgggcaccaacaactgtgacaccgatgccatctacctcgaaatttctagaagcggagattacctcaacgggcaggacattccaacggaaatcaccatcgagcgcttcggaaaagtagatgaatcaacaatcggaaatgtcacagaggaacatagctccgtcgatcttaccgaggctgcagcatcagaggcacaccctgtcacacctggccagtggttcacatcggccgctgatctagatcccgcaggtgagaaagtctcctccatcatcgttccaggagaaacccacttctatgcgctgcctgtcgactacggccaagaactgcgcgcagctgtagaaacaacttttgaccaaatcgacagttccgcgcttggcacgcatctttatatccaagcgttcagcccaaaccgggcagagatagagctcaccaatagagatacgtcatatgcggacgacaacgggctcaaaacttttggattcttcaccccagtgagtgcagcaaatttgttcgagaaaagttctcaaggcatatcgctaaggagcccatggcaaggtggcacccaatacctcgcagtgacatacctaccaagtggtcaagatgaagatgtatccgcaactgatcagctgcccacattggaatatgaactcgtggcagaagcgtttggagaccctgttgacccaccggttttcgcttcattgacgggagcaaccccaagcacctccacccccccatcagatgttgcggaagatgaacaaatctccgaggcaacagaagaagactcaagcagtttccccatcgtgtggattgggctgggtgtcattggcttaggcataatcattggtttgatctttgcgctgagaagaaagaattaagccctaaaagataaagagtc

SEQ ID NO: 230 - protein, 634 aa, Corynebacterium glutamicum
VSQPLSKRLSIRKALASAFIVALAFSLSPVAKAQANETPTMIVLDNSGSMTAQDAGGQTRIDAAKQASTQLINDISDRTDVGLTYYGGNTGETEADVEMGCQDVTILGGPSRGNADTLIDTINSLQPRGFTPIGKALTDTAAELPEGGNIVLVSDGIANCTPPDVCEVAQELAQSGINLVINTIGLNVDPAAREELECIAGVGGGTYADASDAQSLTDALTRAASRQYNSYTSDVTKIDGASEQSAAVEIDEDTELFLTDLPQESRFWKIPVEPGETISVSANTVTDPTVLTMGQGGIKLEAQLHTEEAPQYGLRGRCTRVSFDNFKPGLGVRGIQNASVASKEVGTNNCDTDAIYLEISRSGDYLNGQDIPTEITIERFGKVDESTIGNVTEEHSSVDLTEAAASEAHPVTPGQWFTSAADLDPAGEKVSSIIVPGETHFYALPVDYGQELRAAVETTFDQIDSSALGTHLYIQAFSPNRAEIELTNRDTSYADDNGLKTFGFFTPVSAANLFEKSSQGISLRSPWQGGTQYLAVTYLPSGQDEDVSATDQLPTLEYELVAEAFGDPVDPPVFASLTGATPSTSTPPSDVAEDEQISEATEEDSSSFPIVWIGLGVIGLGIIIGLIFALRRKN

SEQ ID NO: 231 - DNA, 694 bp, Corynebacterium glutamicum
  CDS (101)..(694): FRXA00787
ccagcccgcccaataaataatttctctcttctaattgcggagcctcatatattgagtacggtattttgaaacaccttcagccccctttttaggagccacagtgtctcagcctctcagcaagcgtctcagcatacgaaaagcactcgccagcgccttcatagttgcgctggcgttttcgctttccccagtagccaaagcccaagccaatgaaactccgacgatgatcgtgttggacaattcaggctccatgacagctcaagatgccggcggacagacccgtatcgatgcagcaaaacaagcctccactcagttaattaatgacatctccgaccgcaccgacgtaggtctgacctactacggcggaaacaccggcgaaacagaagcagacgttgagatgggatgccaagacgtcaccatccttggcggcccctcccgaggaaatgcagacaccttaattgacacgatcaacagcctgcagcctcgaggcttcacccccatcggcaaagcactcaccgataccgccgccgagctccccgaaggcggaaacattgtgttggtctccgatggcatcgccaactgcaccccaccggatgtctgcgaagtagcccaagaactggctcaaagtggaatcaacctggttatcaacaccatcggactaaatgttgatccagcagcgcgcgaagaactggagtgc

SEQ ID NO: 232 - protein, 198 aa, Corynebacterium glutamicum
VSQPLSKRLSIRKALASAFIVALAFSLSPVAKAQANETPTMIVLDNSGSMTAQDAGGQTRIDAAKQASTQLINDISDRTDVGLTYYGGNTGETEADVEMGCQDVTILGGPSRGNADTLIDTINSLQPRGFTPIGKALTDTAAELPEGGNIVLVSDGIANCTPPDVCEVAQELAQSGINLVINTIGLNVDPAAREELEC

SEQ ID NO: 233 - DNA, 828 bp, Corynebacterium glutamicum
  CDS (1)..(828): FRXA00791
ctattcctcaccgacctgccacaagaatcccgcttttggaaaatccctgtagagccaggtgaaaccatctcagtttctgccaacacagttaccgacccaacagtactcaccatggggcaaggcggaatcaagcttgaagcccaactccatactgaagaggctccacaatacggcctgcgtggtcggtgcactcgggtctcatttgataatttcaagcccggccttggtgtacgcggaatccaaaacgcgtccgttgcatcaaaagaagtgggcaccaacaactgtgacaccgatgccatctacctcgaaatttctagaagcggagattacctcaacgggcaggacattccaacggaaatcaccatcgagcgcttcggaaaagtagatgaatcaacaatcggaaatgtcacagaggaacatagctccgtcgatcttaccgaggctgcagcatcagaggcacaccctgtcacacctggccagtggttcacatcggccgctgatctagatcccgcaggtgagaaagtctcctccatcatcgttccaggagaaacccacttctatgcgctgcctgtcgactacggccaagaactgcgcgcagctgtagaaacaacttttgaccaaatcgacagttccgcgcttggcacgcatctttatatccaagcgttcagcccaaaccgggcagagatagagctcaccaatagagatacgtcatatgcggacgacaacgggctcaaaacttttggattcttcaccccagtgagtgcagcaaatttgttcgagaaaagttctcaaggcatatcgctaaggagcccatggcaaggtggcacc

SEQ ID NO: 234 - protein, 276 aa, Corynebacterium glutamicum
LFLTDLPQESRFWKIPVEPGETISVSANTVTDPTVLTMGQGGIKLEAQLHTEEAPQYGLRGRCTRVSFDNFKPGLGVRGIQNASVASKEVGTNNCDTDAIYLEISRSGDYLNGQDIPTEITIERFGKVDESTIGNVTEEHSSVDLTEAAASEAHPVTPGQWFTSAADLDPAGEKVSSIIVPGETHFYALPVDYGQELRAAVETTFDQIDSSALGTHLYIQAFSPNRAEIELTNRDTSYADDNGLKTFGFFTPVSAANLFEKSSQGISLRSPWQGGT

SEQ ID NO: 235 - DNA, 1626 bp, Corynebacterium glutamicum
  CDS (101)..(1603): RXA01057
aactaatgggcaggctgagcagcttaaacaacacatcgatagcctccaaccgcggggctatacgccgattggtgaatccctgcgcaaggctgcagcagaattgcctgaaggccaatctggcaccatcgtattggtctctgatggcattgcaacgtgtacgccccctccagtgtgtgaggttgctgcagaactagccgaccagggtgttgatctggtgattaacactgttggattcaacgtcgatgagtctgctcgcgcggaactggagtgcattgcgcaggctggaaacggtacttatgcagatgcgagcgatgcggattcgcttgtggcagaactgaagcgagctgccacccgcacggcagtgggctatgaatcagacctggaacaaatcgatggcaacagcagccaaacaagcctgaccccaattccagatgatgtggaattgttcaaagccgatcttccagcactagataataaagacggcgaagtaactcagtactggtccattcccgttgaagattatgaacgtgtgcaggtaaccacctcgtatgttgcgccagtgacttttggactcgggaacgactacctgagcattaggaatgaactgcttttcggagatgaacaagatcaaacctgtcatcgttcgatcagcaatgatcaaattcttgataattacggtgcgcggcctttggttgccagtgtggagtcagatgtgattggagataagtgcgataccgatgaactggttctcgcaatcaccagaagccagcctttcaattgggaagaagaattacctgttgagatcgtggtaaagcgccttaatcacgcggatacgtcagggcttccactcggtgatcaacagcgtgaaatcccagatctcgacgtggccgcagtacaaacatgggcacccaccactggcggatcttggtttaccaacgctacggagctaactccaggtgaaggtgttgaagcagagatcgtacctggtgaaaatcacgtttatcgcctgcctatggcaactggtcagcagctgcatggctttgtggaagttgtagaaaacacggcaccagatgatcctggcgtgacggacaaattgggtgttgcagtgtattcgccaacacgacaggacgccggagttgatatgtggacggatatcgctccacgtgagggcaccagtgagtattttgcagcgccagttgcactgacttatctgaatatgttccctgctgaaggcggatttggcactacttctaaggccaccagcacgtttacgtttgaaggcgattactacctcgttgtgcactatgacgatctcagtggcagtacaatcagagatgccagcaaccagcagtcttttccccttcgttatcgcttagcagcggatgcttttggtgatgcagagccaggcccagtgtttgaaaaggtttctgcaaccacctcagaatcctctagcccaagcactcaaccagatgagccagctcaaaataccgcaactgaggaaagcagcactggaatctccccgctcattgttggcgctatcgtcgcactcattttggcgttcgctgcgtttgccagctggctagttttgaaaggccgcaagaaataaccccataggaatttccaaac

SEQ ID NO: 236 - protein, 501 aa, Corynebacterium glutamicum
LPEGQSGTIVLVSDGIATCTPPPVCEVAAELADQGVDLVINTVGFNVDESARAELECIAQAGNGTYADASDADSLVAELKRAATRTAVGYESDLEQIDGNSSQTSLTPIPDDVELFKADLPALDNKDGEVTQYWSIPVEDYERVQVTTSYVAPVTFGLGNDYLSIRNELLFGDEQDQTCHRSISNDQILDNYGARPLVASVESDVIGDKCDTDELVLAITRSQPFNWEEELPVEIVVKRLNHADTSGLPLGDQQREIPDLDVAAVQTWAPTTGGSWFTNATELTPGEGVEAEIVPGENHVYRLPMATGQQLHGFVEVVENTAPDDPGVTDKLGVAVYSPTRQDAGVDMWTDIAPREGTSEYFAAPVALTYLNMFPAEGGFGTTSKATSTFTFEGDYYLVVHYDDLSGSTIRDASNQQSFPLRYRLAADAFGDAEPGPVFEKVSATTSESSSPSTQPDEPAQNTATEESSTGISPLIVGAIVALILAFAAFASWLVLKGRKK

SEQ ID NO: 237 - DNA, 225 bp, Corynebacterium glutamicum
  CDS (101)..(202): RXA01055
agaatgaagtgggtgggttcccggcccggtcactccggatgggcgtccgttgattgggcagaccaaggcggagaacatttacgttgccggtggtcacggcatgtggggtgtggtgctgggccctgccaccggtaagtatttggcggagctgatggctacgggcaacaccaacccgatcatcaagccgttcgatccgctgcgttaactgcccaataattggttgaa

SEQ ID NO: 238 - protein, 34 aa, Corynebacterium glutamicum
MWGVVLGPATGKYLAELMATGNTNPIIKPFDPLR

SEQ ID NO: 239 - DNA, 1023 bp, Corynebacterium glutamicum
  CDS (101)..(1000): RXA01056
caagaaataaccccataggaatttccaaaccaatacatttaagtacgaactcatgaatactgggggcactaggagtccaccccaccctcaggagggtttcatgagttcgtctggaaaagtcattgttgttggagccggcatagtgggtcttgccaccgcctggcatttacaggagcacgggttcgaggtgagcgtccttgatcgggatggtgtcgctgcaggttcttcgtggggtaatgctggttggttagcgccggcgaaaactattccgttgtcggagccggggctgtggacgtatggtccgaaagagctgttcaatccggtgtcgccgatgcatatgccacttcgtgtggatcccaaactgtggcttttcttggcgcaatttatggcgcaggcttttcaacgcaagtgggattccacgatggcggacctcacggagatcgataaggtcgcgctcgaagcttttgatgaactgtcgatcggtggcgtggaaggcctcacccatgaaggtccatttgttattggttttgaggaagagcgccaatcggcgggtttccgtaaggaaattgatggcgtgagcaggcacggccagaaagtggagatgtctcgactggagaatccacaagagttggcgccgatgctgaatgagcaaattcaggtggcttaccgtttggaaggccagcgtttcatcgagccgggtccatacgtgcagtcattggcggatgctgtggtgaagcgtggtggcgtgatccgcgccggggcagaagttgtgcatgtggcgaagggtgatcgtcccgcggtcattttggcggatggtagccgtgaagaagcggacaaggtggttgtggcaacgggtgcctggctgccgggtctaacgcgtgaatacggtgtgaaaactcttgttcaggctggtcgtggctattccttctctgtggcaacggatattcctgccaagcattctgtgtaccttccccaccaccggcatggcctgcacgccgtatgagggccgtttccgcattgcgg

SEQ ID NO: 240 - protein, 300 aa, Corynebacterium glutamicum
MSSSGKVIVVGAGIVGLATAWHLQEHGFEVSVLDRDGVAAGSSWGNAGWLAPAKTIPLSEPGLWTYGPKELFNPVSPMHMPLRVDPKLWLFLAQFMAQAFQRKWDSTMADLTEIDKVALEAFDELSIGGVEGLTHEGPFVIGFEEERQSAGFRKEIDGVSRHGQKVEMSRLENPQELAPMLNEQIQVAYRLEGQRFIEPGPYVQSLADAVVKRGGVIRAGAEVVHVAKGDRPAVILADGSREEADKVVVATGAWLPGLTREYGVKTLVQAGRGYSFSVATDIPAKHSVYLPHHRHGLHAV

SEQ ID NO: 241 - DNA, 1071 bp, Corynebacterium glutamicum
  CDS (101)..(1048): RXN02021
ttgggtcgccgaggagatctaatcctggtttgagttcagagttcacaggtttaagcctacaaaccttagttaaaacatgatggaagcggtcgattaaaaaatgagtgaaaacattcgcggagcccaagcagttggaatcgcaaatatcgccatggacgggaccatcctggacacgtggtacccagaaccccaaattttcaacccggatcagtgggctgaacgctacccattggaagtgggcaccacacgcctcggagcaaacgaactcaccccacggatgctgcagttggtaaaactggaccaagatcgcctcgtcgaacaggtagcagtccgcaccgttatccccgatctgtctcaacctccagtagacgcgcacgatgtttacctgcgcctccacctgctttcccaccggctggtccgcccccacgaaatgcacatgcaaaacaccttggagctgctgtccgacgtggtgtggacaaacaagggcccttgccttcctgaaaactttgagtgggtgcgtggtgctctgcggtcccgcggactcatccacgtctactgtgtggaccgtcttccccgcatggtcgactatgtggttccccctggagtccgcatctccgaagcagaacgcgtgcgcctaggtgcataccttgctccgggtacctctgtgctgcgtgaaggtttcgtgtctttcaactccggcaccttgggtgccgcaaaggtggaaggccgcctgagttccggtgtggtcatcggtgaaggttccgagattggactgtcttctactattcagtccccgagagatgaacagcgccgccgtttgccgttgagcatcggccaaaactgcaactttggtgtcagctccggaatcatcggagtcagtctgggagacaattgcgacatcggaaataacattgtcttggatggagatacccccatttggttcgcagccgatgaggagttacgcactatcgactccatcgaaggccaagcaaattggtcaatcaagcgtgaatccggcttccatgagccagttgcccgcctcaaagcttgacccattttcataaccagtgc

SEQ ID NO: 242 - protein, 316 aa, Corynebacterium glutamicum
MSENIRGAQAVGIANIAMDGTILDTWYPEPQIFNPDQWAERYPLEVGTTRLGANELTPRMLQLVKLDQDRLVEQVAVRTVIPDLSQPPVDAHDVYLRLHLLSHRLVRPHEMHMQNTLELLSDVVWTNKGPCLPENFEWVRGALRSRGLIHVYCVDRLPRMVDYVVPPGVRISEAERVRLGAYLAPGTSVLREGFVSFNSGTLGAAKVEGRLSSGVVIGEGSEIGLSSTIQSPRDEQRRRLPLSIGQNCNFGVSSGIIGVSLGDNCDIGNNIVLDGDTPIWFAADEELRTIDSIEGQANWSIKRESGFHEPVARLKA

SEQ ID NO: 243 - DNA, 771 bp, Corynebacterium glutamicum
  CDS (101)..(748): RXS00949
gctcaaggatccttcctgggcaaaccaagcagccctcgcactaggtgcggaacccaggtatgttcaccaatacgactacgtactttaaaggagagttgacatgaaggttttcatcatcggcgctgcgggtggcatcggcaatcgactttccagcctgcttcacgccaggggagatgcagttagcggcatgcaccgcaatcttgagcaggcctcaaaaatcacagacactggggcaactgccgtactcggggatctcatccacaacagcacggaggagcttgcggagcttttccgcggtcacgatgccatcgtattttctgcaggcgcccacggaacagggcaagaaaataccacgcttatcgacggcgccggcctccgtaaagccgccgacgctgccagcgcggccaacgtttcacgcttcatcttggtctctgcgtttccggaatcctcccgcggggagaacaccaccgagaactttgagcactatatgaaggtgaagaagtccgccgatgtctacctcagtcacactgacctagactgggttattgtccgaccaggcgtgcttcaagatgaggcaggggatggtttagtcactgctggcttagcgattaattacggcaatgttgctcgcgataatgtcgcagcgttcattgatgaagctctgcatcaaccgcagttgtcaaagatcattgttgaactcaccgacggttcaactccggtggcggaagccgtagaacgcctcatcaagtaaagacgaaaagagggagaatg

SEQ ID NO: 244 - protein, 216 aa, Corynebacterium glutamicum
MKVFIIGAAGGIGNRLSSLLHARGDAVSGMHRNLEQASKITDTGATAVLGDLIHNSTEELAELFRGHDAIVFSAGAHGTGQENTTLIDGAGLRKAADAASAANVSRFILVSAFPESSRGENTTENFEHYMKVKKSADVYLSHTDLDWVIVRPGVLQDEAGDGLVTAGLAINYGNVARDNVAAFIDEALHQPQLSKIIVELTDGSTPVAEAVERLIK

SEQ ID NO: 245 - DNA, 594 bp, Corynebacterium glutamicum
  CDS (101)..(571): RXS00004
ttgcactgtcatgactgtatcccgcgaagaagtgtccctgccgagccgaactctgaacaatgccttccggaagtattttccaattcccgatgtagggtcagtgctgactcaattgattgaatcatcgattttcgacaacgttgcgagcagggagtcctctgaatttctcggccatgctgccatcgatctacttgctggccttgtctatgaaaaagccactccctatgctccagatgaagcacttagagtggcagtttatggctatattcgggagaaccttggatcctcacaacttacggtcgcagctgtagccggggcgcatagaatcgcggttcgtacgttgcatcgattatttgaaggcgaagcatacggagtagcggaattaatccgacacctccgattagaggcagtatatgaagaccttcgggatcctcgcctccagaacctgaccattttggctatcggcatgcgccacggcatttccagccaagctcatttaacaagactgtttcgcgctaaatatggggtaccgccggcagagtttcgccgagggtatattaatagcgctgcttgagggcaccgcaagcgtggcgc

SEQ ID NO: 246 - protein, 157 aa, Corynebacterium glutamicum
VLTQLIESSIFDNVASRESSEFLGHAAIDLLAGLVYEKATPYAPDEALRVAVYGYIRENLGSSQLTVAAVAGAHRIAVRTLHRLFEGEAYGVAELIRHLRLEAVYEDLRDPRLQNLTILAIGMRHGISSQAHLTRLFRAKYGVPPAEFRRGYINSAA

SEQ ID NO: 247 - DNA, 783 bp, Corynebacterium glutamicum
  CDS (101)..(760): RXS00166
ggcgtttagcgatcttcaacatcgagcaaccagcgccagcgcttttacccaaggcagcacgacttatcacgatgtccgacctggatatccggctgaggccgtggagttagcccgtgggtttggccgagtcctggatgtcggtgcaggtaccggaaaactaaccagtgagctaacagctgatcaggtcctagcccttgatccaagcatggacatgttgcgggtgtttcgctccgcgcttccggcggttccctgctggcaagcgacagcagaacacacaggaatacgtgacaacgcggttgatctgattacgtgcgcacaaacgtggcattgggttgacgtgacggctgcctcagcggaatttgatcgggtgattgcacctgagggtgcagtcctgctcgtgtggaataacctggacacctccatcgcgtgggtacaccgactcagtcgcattatgcatgccggcgatgtactcaagccgggattcaccccagaaaccgcagctccctggataattgatcgagaaattcgcaccacgtggaatcagcacctcacccctgaagaaatcatccagctcgctcacacgaggtcctactggttaaacgcgtcagagaaaatcaaagagcgtgttgatcagaaccttcagtggtatctctacgagcatttgggtttcagtcccgacaatccagtggaacttccctatcgctgtgatgcatttttactttcacgttccggtaccctggcaggcagatcttccaatctttaggagccctcgccatgtacctg

SEQ ID NO: 248 - protein, 220 aa, Corynebacterium glutamicum
VELARGFGRVLDVGAGTGKLTSELTADQVLALDPSMDMLRVFRSALPAVPCWQATAEHTGIRDNAVDLITCAQTWHWVDVTAASAEFDRVIAPEGAVLLVWNNLDTSIAWVHRLSRIMHAGDVLKPGFTPETAAPWIIDREIRTTWNQHLTPEEIIQLAHTRSYWLNASEKIKERVDQNLQWYLYEHLGFSPDNPVELPYRCDAFLLSRSGTLAGRSSNL

SEQ ID NO: 249 - DNA, 1134 bp, Corynebacterium glutamicum
  CDS (101)..(1111): RXS00288
ggcgtgctaaaaaagcacgtcaaatacagaatcggcagattacatcgctgagcagagaaaacacgggcatgaaacgtacccaagggctaacatcgggggcatgagcgcgcaaatggatacccctgatcccactatgtctgctgttgcaatgttagattccatcccttctgatcaaccagatttcctgatcgatgtagaagtagatcgaccaactcccggaccacatgatctgctagtccacattgaggcggtctcaattaaccctgttgataccaaggtacgcatgcgggccgggaagcaaaagcatcctaaaattttaggttttgatgctgcaggtgaggtggtggctgttggatcgcaggtcacgctcttcaatgttggtgacaaagtgttctacgcaggatccaatcagcgtccaggaagtaacgcagagtaccaggtggtggatgaacggctggtgggtcacgcaccacaaagcttgggggcacacgacgccgctgctctcccacttgtcgcgctcactgcatgggagtcactttttgaccgattgggagtaactcagtcaactactggaacactgttggtcttgggcggttcaggaggtgtgccttcagctcttattcaacttgctcgagctctcactggtctgaaagtagtggcaacagcttctcgccctgaatcacaagaatgggtgacaaagctcggtgctcatgaggtgattgatcactccaaggatttgagtgagcaaatctccgacgtggattttgttttcagctcgtggactactgggcgtgaagtagagctcgccacgttgatgaaaccccagtcccacctagtgctcatcgatgatccagtggatcccaatttgggcgcttttaagcaaaaagcgatcgctttgcactgggagttcatgtttacccgcgctatgttcaacactcctgatatgggtgaacaagggaaaattctgaataagatcgccgacatggttgatcggggtcagtttgagtccgtgacagcaacggtgctggatgggctcaacgctgcaaacatcatggaggggcaccggctcgttgagcagggtaaaacctcaggaaaaattgttgtgagggtataaagaggacttgaaaaatgcac

SEQ ID NO: 250 - protein, 337 aa, Corynebacterium glutamicum
MSAQMDTPDPTMSAVAMLDSIPSDQPDFLIDVEVDRPTPGPHDLLVHIEAVSINPVDTKVRMRAGKQKHPKILGFDAAGEVVAVGSQVTLFNVGDKVFYAGSNQRPGSNAEYQVVDERLVGHAPQSLGAHDAAALPLVALTAWESLFDRLGVTQSTTGTLLVLGGSGGVPSALIQLARALTGLKVVATASRPESQEWVTKLGAHEVIDHSKDLSEQISDVDFVFSSWTTGREVELATLMKPQSHLVLIDDPVDPNLGAFKQKAIALHWEFMFTRAMFNTPDMGEQGKILNKIADMVDRGQFESVTATVLDGLNAANIMEGHRLVEQGKTSGKIVVRV

SEQ ID NO: 251 - DNA, 1347 bp, Corynebacterium glutamicum
  CDS (101)..(1324): RXS01114
ttcggtggaagatatccgcaagctggtgctgccgcagcttttagaaacggctcaagcaatttcgacagatctctctgcactctaaattaaggatcaaaaaatgaaccctcaagatattgtcatctgttccccattgcgcaccccagttggtgcttacggcggatccttcaccggcgtccctgttgaagaattggccaccaccgtgatcaacgcgatcgttgaggcaaccggcatcaccggcgacgatgtggacgatctgatcctcggccaggcatcccccaacggtgcggctccagcactgggccgtgttgttgctctagattccaagcttggccaaaacgttccaggcatgcagcttgatcgccgctgtggttccggcctgcaggcaatcgtcaccgctgctgcacacgttgcatccggcgctgctgatctgatcatcgcaggtggcgcagaatccatgagccgcgttgagtacaccgtgtccggcgatatccgttggggtgtcaagggcggcgacatgcagcttcgtgaccgccttgcagaagcacgcgaaaccgctggcggacgcaaccacccgatccctggtggcatgatcgagaccgctgagaacctgcgtcgcgaatacggcatctcccgcgaggagcaggacaagatctccgcagcgtcccagcagcgttggggcaaggctgctgatgcggggcttttcgacgacgagatcgtgccagtcaccgtccctgccaagaagcgcggccaggagccaaccatcgtttctcgagacgagcatggtcgaccaggaacaaccgtcgaaaagcttgctgctttgcgccccatcatgggccgccaggatgcggaagcaaccgtcaccgctggcaacgcgtccggccaaaatgatggcgctgctgccgtcatcgtgaccactcgcgccaaggccgaggagaagggcctgcgcccagtcatgcgtttggctggctggtctgtggctgctgttcccccagagaccatgggtattggacctgttcctgccaccaagaaggtcctggatcgtttgggccttaccctggaggacatcggcgcgatcgaactcaacgaagctttcgcagctcaggcactgtctgtgctgaaggaatggaacatttcttgggaagatgagcgcgtcaacccactgggttccggtatttccatgggacacccagtcggtgccaccggtgctcgcatggcagtaaccttggctcaccgcatgcagcgtgaaaacactcagtacggactggccaccatgtgcatcggtggcggccagggtcttgcagctgtctttgaaaaggagaactaaaaatggctattttgcacagc

SEQ ID NO: 252 - protein, 408 aa, Corynebacterium glutamicum
MNPQDIVICSPLRTPVGAYGGSFTGVPVEELATTVINAIVEATGITGDDVDDLILGQASPNGAAPALGRVVALDSKLGQNVPGMQLDRRCGSGLQAIVTAAAHVASGAADLIIAGGAESMSRVEYTVSGDIRWGVKGGDMQLRDRLAEARETAGGRNHPIPGGMIETAENLRREYGISREEQDKISAASQQRWGKAADAGLFDDEIVPVTVPAKKRGQEPTIVSRDEHGRPGTTVEKLAALRPIMGRQDAEATVTAGNASGQNDGAAAVIVTTRAKAEEKGLRPVMRLAGWSVAAVPPETMGIGPVPATKKVLDRLGLTLEDIGAIELNEAFAAQALSVLKEWNISWEDERVNPLGSGISMGHPVGATGARMAVTLAHRMQRENTQYGLATMCIGGGQGLAAVFEKEN

SEQ ID NO: 253 - DNA, 554 bp, Corynebacterium glutamicum
  CDS (1)..(531): RXS01205
gtatcggcctatccgccggccatcatcgcagcggctctcgtaggaatttgcgcgggagttttgccccataattttgaaccctcgcgaatatttatgggcgattccggctccatgctcatcggcctgctgttggctgcagcatcgacctcagcgtcaggaaaaatcaacatgagcctgtatggcgcagctgattttatcgcattgatctcacccatcatcgttgttctcgccgccgtggccatcccactgctcgacctcgtgatggcagtggttaggcgcgtgggcaggggagcatcacccttttccccggacaaaatgcatctgcaccaccgactgctgtccatcggacacacccataggcgcgtggtcctagtgctctacacctgggcgagcgccgtggcattcggcgcagtgagcttctccgtcgttccgccactgtttgccaccggatcgagcatctgtggcatcctcatcgccgtcgctgtcacagccgtgccagtgatgaaaagccggcgagccgccaaacttgattaagtgattgtcactttggattg

SEQ ID NO: 254 - protein, 177 aa, Corynebacterium glutamicum
VSAYPPAIIAAALVGICAGVLPHNFEPSRIFMGDSGSMLIGLLLAAASTSASGKINMSLYGAADFIALISPIIVVLAAVAIPLLDLVMAVVRRVGRGASPFSPDKMHLHHRLLSIGHTHRRVVLVLYTWASAVAFGAVSFSVVPPLFATGSSICGILIAVAVTAVPVMKSRRAAKLD

SEQ ID NO: 255 - DNA, 564 bp, Corynebacterium glutamicum
  CDS (101)..(541): RXS01269
gattatctctgcgccgattcagctggcaatagcagcagttgtattgagagctcatggtcgtccgattctatttcgtcaaccacgacctgggaaagacggtgtggtatttgagatgattaagtttcgaaccatgcttgaaccagatgaaaaacatgtaactgatgaacagcgtctaactaaagttggaaagcttctgcgggaaacgagtttagatgagttacctacactctggaatgtatttaaaggtgatatgagccttgtagggcctcgacctttgcttgttagctatctggaacattactcttctgaacaagctcgacgccatgaagttcgtcctgggattactggtttggctcaggtgaatggccgtaatcaaactacttgggatgaacgacttaagttggatgtcgaatatgtggatcgctgtagtttgaaactagatttcaaaatattaatcgccactgtaaaaacagttctttctaaaaagggcattagtaatgaaggtcatgtcacgatgccatccttcattgaagaaagaaaatagcaggtaaaaattttactttc

SEQ ID NO: 256 - protein, 147 aa, Corynebacterium glutamicum
VVFEMIKFRTMLEPDEKHVTDEQRLTKVGKLLRETSLDELPTLWNVFKGDMSLVGPRPLLVSYLEHYSSEQARRHEVRPGITGLAQVNGRNQTTWDERLKLDVEYVDRCSLKLDFKILIATVKTVLSKKGISNEGHVTMPSFIEERK

SEQ ID NO: 257 - DNA, 510 bp, Corynebacterium glutamicum
  CDS (101)..(487): RXS01421
ttgatgcacgtgcagaaatcgtcggcggtccgtggcacccatctgttaagggagactcggttactgcagggatcctgcgagatcgagtaaacgcctaaagatgacgtcgaaaagcattagcggcaagcgcccgaatctgccgtcgctcactggagcgcggtggctcgcggcgctcgctgtttattttttgcatgcgttggtgtttttgtcggtgtatccgttccagcagtcggaactgtttgccacaatccataaatttgtccccatgcagctgggttcagctggtgtaaccttcttctttatcttgtccggatttttgatctattggtcaaatagccagctcaagggcatgaagaatgtgctgtattactgcaagcgccgcatcaccaagatttatcccatgcacttgattgcgttgccgatgtttattgaggcgtcggcgaagttcacgactacaggcattacctgggtgctgattttgcgcgagtaaagctgtggctgcggaatgcg

SEQ ID NO: 258 - protein, 129 aa, Corynebacterium glutamicum
MTSKSISGKRPNLPSLTGARWLAALAVYFLHALVFLSVYPFQQSELFATIHKFVPMQLGSAGVTFFFILSGFLIYWSNSQLKGMKNVLYYCKRRITKIYPMHLIALPMFIEASAKFTTTGITWVLILRE

SEQ ID NO: 259 - DNA, 774 bp, Corynebacterium glutamicum
  CDS (101)..(751): RXS01491
aacggtgtgaaacacattgaagtgtcgttgggttatccgcgcgaatgggagcattggtctgggcagcatgtgtggccatatccagtgatggaggtggacaatgctggatgagtctttgtttccaaattcggcaaagttttctttcattaaaactggcgatgctgttaatttagaccatttccatcagttgcatccgttggaaaaggcactggtagcgcactcggttgatattagaaaagcagagtttggagatgccaggtggtgtgcacatcaggcactccaagctttgggacgagatagcggtgatcccattttgcgtggggaacgaggaatgccattgtggccttcttcggtgtctggttcattgacccacactgacggattccgagctgctgttgtggcgccacgattgttggtgcgttctatgggattggatgccgaacctgcggagccgttgcccaaggatgttttgggttcaatcgctcgggtgggggagattcctcaacttaagcgcttggaggaacaaggtgtgcactgcgcggatcgcctgctgttttgtgccaaggaagcaacatacaaagcgtggttcccgctgacgcataggtggcttggttttgaacaagctgagatcgacttgcgtgatgatggcacttttgtgtcctatttgctggttcgaccaactccagtgccgtttatttcaggtaaatgggtactgcgtgatggttatgtcatagctgcgactgcagtgacttgaactggatggagaggatacct

SEQ ID NO: 260 - protein, 217 aa, Corynebacterium glutamicum
MLDESLFPNSAKFSFIKTGDAVNLDHFHQLHPLEKALVAHSVDIRKAEFGDARWCAHQALQALGRDSGDPILRGERGMPLWPSSVSGSLTHTDGFRAAVVAPRLLVRSMGLDAEPAEPLPKDVLGSIARVGEIPQLKRLEEQGVHCADRLLFCAKEATYKAWFPLTHRWLGFEQAEIDLRDDGTFVSYLLVRPTPVPFISGKWVLRDGYVIAATAVT

SEQ ID NO: 261 - DNA, 615 bp, Corynebacterium glutamicum
  CDS (101)..(592): RXS01572
ctgctgtgcgcaggcatcaccacctactccccaatcgctcgctggaacgttaaagaaggcgacaaagtagcagtcatgggcctcggcgggactcggacacatgggtgtccagatcgctgcagccaagggtgctgaggttaccgttctgtcccgttccctgcgcaaggcagaacttgccaaggaactcggcgcagctcgcacgcttgcgacttctgatgaggatttcttcaccgaacacgccggtgaattcgacttcatcctcaacaccattagcgcatccatcccagtcgacaagtacctgagccttctcaagccacacggtgtcatggctgttgtcggtctgccaccagagaagcagccactgagcttcggtgcgctcatcggcggcggaaaagtcctcaccggatccaacattggcggcatccctgaaacccaggaaatgctcgacttctgtgcaaaacacggcctcggtgcgatgatcgaaactgtcggcgtcaacgatgttgatgcagcctacgaccgtgttgttgccggcgacgttcagttccgcgttgtcattgatactgcttcgtttgctgaggttgaggcggtttaggtttactgaagttcagactt

SEQ ID NO: 262 - protein, 164 aa, Corynebacterium glutamicum
MGVQIAAAKGAEVTVLSRSLRKAELAKELGAARTLATSDEDFFTEHAGEFDFILNTISASIPVDKYLSLLKPHGVMAVVGLPPEKQPLSFGALIGGGKVLTGSNIGGIPETQEMLDFCAKHGLGAMIETVGVNDVDAAYDRVVAGDVQFRVVIDTASFAEVEAV

SEQ ID NO: 263 - DNA, 876 bp, Corynebacterium glutamicum
  CDS (101)..(853): RXS02453
aaccaacaaaggtcatctcaaccggcttaagaaaattctgccagctttctgctgattgaatcgtgccagctcagggcatatctcacctaaagtaaacaccatgaaatcaatcttcatttccggtgcggcgaacggaattggcaaagctgtggcgttgaaatttcttcacgaaggttggctcgttggagcctacgacctcgcggaaatcacctactcacaccccaatcttcgctggggctacctcaatgttcgacagtccgagtcgtgggacaaagccctagaagactttgcgacgcacaccggaggcaccatcgatgtggtggacaataatgccggcgtaattattgagggaccgctgcaggacgcagaggaggggagcgtcgacaagcttcttgcaatcaacgtcaatggcgtgactcttggtgcccgcgccgctcatccttatttggcgcgcacgccgggcgcccagttgttaaacatgtcctcggcgtcggcggtgtacgggcagccccagatcgcggtgtattcggcttcgaagttttacgtcgcaggtcttactgaggcgctgaatttggagtggcggaaagacgatattcgcgtggtcgatgtttggcctttgtgggcgaaaaccgatttggtgaacggcgtgaaggctaagtcactgaagcgtttgggtgtccggatcactccggaacaggtggcacaggcggtatgggatgcggtgcatccgaaatctcggtgggcgaagggaaaggtgcatcacggggtgtcaaagttggataaggcgctgtatctcatgaaatctctgtcgcctgatcgggtagcgatgtgttttgcgcgactaatcgccggataaatgaattgattattttaggc

SEQ ID NO: 264 - protein, 251 aa, Corynebacterium glutamicum
MKSIFISGAANGIGKAVALKFLHEGWLVGAYDLAEITYSHPNLRWGYLNVRQSESWDKALEDFATHTGGTIDVVDNNAGVIIEGPLQDAEEGSVDKLLAINVNGVTLGARAAHPYLARTPGAQLLNMSSASAVYGQPQIAVYSASKFYVAGLTEALNLEWRKDDIRVVDVWPLWAKTDLVNGVKAKSLKRLGVRITPEQVAQAVWDAVHPKSRWAKGKVHHGVSKLDKALYLMKSLSPDRVAMCFARLIAG

SEQ ID NO: 265 - DNA, 897 bp, Corynebacterium glutamicum
  CDS (101)..(874): RXS02474
tgctggtctattgtggcgaccgagggcctttgaaggttcgacaaactgtataaggccttgaatcttgagaatttattttgaggaagcaagaggaagtgtcatgagcaaagttgcaatggttaccggtggtgcacaaggcatcggtcgtggaatttcagagaagctggcagcagatggtttcgatattgccgtagccgacctgccacaacaggaagaacaagctgcagagaccatcaagttgattgaagctgcaggtcaaaaggctgtattcgttggattagatgtcaccgataaggctaatttcgacagtgcaattgatgaggcagcagagaaacttggcggcttcgatgtgctagtaaacaacgccggcatcgcacaaattaagccacttctggaagtcaccgaagaagacctaaagcagatctactccgtgaacgtttttagcgtattttttggtattcaagcagcatcccgaaagttcgatgagcttggcgtaaaaggcaagatcatcaacgctgcatcaatcgctgctatccaaggtttcccaatcttgagcgcctactccaccaccaaattcgcggttcgtggcctcacccaggctgctgcgcaagaactcgcacccaagggtcacaccgtgaatgcctacgcacctggcatcgtgggcaccggaatgtgggagcaaatcgatgccgagctttccaagatcaacggcaagccaatcggtgagaacttcaaggagtactcctcctcaatcgcattgggccgaccatcagtacctgaggatgtagccggtctggtttcgttcctggcttctgaaaactccaactacatcaccggacaggtcatgcttgtcgacggcggcatgctctacaactaggggttgctttcccgcactca

SEQ ID NO: 266 - protein, 258 aa, Corynebacterium glutamicum
MSKVAMVTGGAQGIGRGISEKLAADGFDIAVADLPQQEEQAAETIKLIEAAGQKAVFVGLDVTDKANFDSAIDEAAEKLGGFDVLVNNAGIAQIKPLLEVTEEDLKQIYSVNVFSVFFGIQAASRKFDELGVKGKIINAASIAAIQGFPILSAYSTTKFAVRGLTQAAAQELAPKGHTVNAYAPGIVGTGMWEQIDAELSKINGKPIGENFKEYSSSIALGRPSVPEDVAGLVSFLASENSNYITGQVMLVDGGMLYN

SEQ ID NO: 267 - DNA, 1224 bp, Corynebacterium glutamicum
  CDS (101)..(1201): RXS02485
cggtggtcagtgcttggtgcaccttgccgacgggctgattgatcgtaatggtgttttctgtacgcgttgccatgaggataagactaccgttagtggggtgttggattcatcgctagcccaggaaatcgccgcgatcgacggcgtcgaactcgattcggaagtcactttcgccgatctgacgaccctccgcatcggcggaaaaccccgcagcgccgtacgttgccagaccacggaggcgctggtcagcgccataaaattgcttgacgacgcctccctccccctcctcattgtcggcggcgggtccaatctcgtcgtggccgacggcgatctggatgttattgccgtcatcatcgaaaccgacgacgtctccatcaacctcaccgacggtctcctcaccgccgatgcaggcgctgtttgggacgatgttgtccacctttcggtggatgccggcctcggtggaattgaatgcctctccggaatccccggctccgccggcgccaccccagtccaaaacgtgggcgcctacggcacggaagtttccgatgtactcacccgcgtccagcttctcgaccgcaccacccaccaagtctcctgggtcgacgcctccgaactcgacctctcttaccgatactccaatctcaaattcaccaaccgcgcagtcgtcttggcgatcgaactccagctcctcaccgacggattgtccgcgccgctacgttttggtgaattgggacgtcgattagcgatctccgaggccgaaccccacccacgtcgccccgtccgcatggtccgcgacgccgtcctagaactccgccgcgccaaaggcatggtcgtggaacacaccgaccacgacacctggtccgccggatccttcttcaccaacccaatcgtcgacccagcccttgccgacgcagtctttgaaaaagtcggcgaacccaccatgccccgcttcccagccggcgatggcaaagaaaaactctccgcagcctggctcatcgaacgcgccggcttcaaaaagggacaccccggcgcaggcgcaaaagcctccctgagcaccaaacacaccctcgcactcaccaaccgtggcgacgcccgcgcctccgacctcgtcgcattagccaaagaaatccgcgacggagtcctcgaaaccttcggcgtcaccctcgtcccagaacccgtctggattggaatcagcatcgatgactgaattttccgacgtccctggca

SEQ ID NO: 268 - protein, 367 aa, Corynebacterium glutamicum
LDSSLAQEIAAIDGVELDSEVTFADLTTLRIGGKPRSAVRCQTTEALVSAIKLLDDASLPLLIVGGGSNLVVADGDLDVIAVIIETDDVSINLTDGLLTADAGAVWDDVVHLSVDAGLGGIECLSGIPGSAGATPVQNVGAYGTEVSDVLTRVQLLDRTTHQVSWVDASELDLSYRYSNLKFTNRAVVLAIELQLLTDGLSAPLRFGELGRRLAISEAEPHPRRPVRMVRDAVLELRRAKGMVVEHTDHDTWSAGSFFTNPIVDPALADAVFEKVGEPTMPRFPAGDGKEKLSAAWLIERAGFKKGHPGAGAKASLSTKHTLALTNRGDARASDLVALAKEIRDGVLETFGVTLVPEPVWIGISIDD

SEQ ID NO: 269 - DNA, 1641 bp, Corynebacterium glutamicum
  CDS (101)..(1618): RXS02539
ggctgctaagcgtgcgaatgtgcgcgttgtcacaatcgttgaccaagtgtcacctgacgcacaggtagtgctcaggtggaggtggcccaaaggagacccaatgactgtctacgcaaatccaggaaccgaaggctcgatcgttaactatgaaaagcgctacgagaactacattggtggcaagtgggttccaccggtagagggccagtaccttgagaacatttcacctgtcactggtgaagttttctgtgaggtcgcacgtggcaccgcagcggacgtggagcttgcactggatgctgcacatgcagccgctgatgcgtggggcaagacttctgtcgctgaacgtgctctgatcctgcaccgcattgcggaccgcatggaagagcacctggaagaaatcgcagttgcagaaacctgggagaacggcaaggcagtccgtgagactcttgctgcagatatcccactggcaatcgaccacttccgctactttgctggcgcgatccgtgctcaggaagatcgttcctcacagatcgaccacaacactgttgcttaccacttcaacgagccaatcggtgttgttggtcagatcattccttggaacttcccaatcctcatggctacctggaagctcgcaccggcacttgctgcaggtaacgcgatcgtcatgaagccagctgagcagaccccagcatccattttgtatctgattaacatcatcggcgatctcatcccagagggcgtcctcaacatcgtcaacggactcggcggtgaagcaggcgctgcactgtccggctctaatcggattggcaagattgctttcaccggttccaccgaggtcggcaagctgatcaaccgcgctgcatccgacaagatcattcctgtcaccctggagctcggcggtaagtccccatccatcttcttctccgatgttctgtcacaggatgacgccttcgcagagaaggcagttgaaggcttcgcgatgttcgccctcaatcagggtgaagtttgtacctgtccttcccgtgcacttgttcatgagtccatcgctgatgaattcctcgagcttggcgtgaagcgagttcagaacatcaagctgggtaacccacttgatactgaaaccatgatgggtgctcaggcgtcccaggagcagatggacaagatctcctcctacctgaagatcggcccagaagaaggcgctcaaaccctcactggtggcaaggtcaacaaggttgatggcatggagaacggttactacattgagccaaccgttttccgcggcaccaacgacatgaggatcttccgcgaggaaatcttcggaccagtcctttctgttgctaccttcagcgacttcgatgaggccatccgtattgcaaacgacaccaactacggcctcggcgctggtgtctggagccgtgaccaaaacaccatttatcgtgcaggtcgcgcaatccaggctggtcgagtttgggtcaaccagtaccacaactacccagcgcactccgctttcggtggatacaaggagtccggcatcggccgtgagaaccacctcatgatgctgaaccactaccagcagaccaagaacctgttggtctcctacgatccaaacccaaccggactgttctgatctaagcgttaagtcctaga

SEQ ID NO: 270 - protein, 506 aa, Corynebacterium glutamicum
MTVYANPGTEGSIVNYEKRYENYIGGKWVPPVEGQYLENISPVTGEVFCEVARGTAADVELALDAAHAAADAWGKTSVAERALILHRIADRMEEHLEEIAVAETWENGKAVRETLAADIPLAIDHFRYFAGAIRAQEDRSSQIDHNTVAYHFNEPIGVVGQIIPWNFPILMATWKLAPALAAGNAIVMKPAEQTPASILYLINIIGDLIPEGVLNIVNGLGGEAGAALSGSNRIGKIAFTGSTEVGKLINRAASDKIIPVTLELGGKSPSIFFSDVLSQDDAFAEKAVEGFAMFALNQGEVCTCPSRALVHESIADEFLELGVKRVQNIKLGNPLDTETMMGAQASQEQMDKISSYLKIGPEEGAQTLTGGKVNKVDGMENGYYIEPTVFRGTNDMRIFREEIFGPVLSVATFSDFDEAIRIANDTNYGLGAGVWSRDQNTIYRAGRAIQAGRVWVNQYHNYPAHSAFGGYKESGIGRENHLMMLNHYQQTKNLLVSYDPNPTGLF

SEQ ID NO: 271 - DNA, 1227 bp, Corynebacterium glutamicum
  CDS (101)..(1204): RXS02578
ggcaaaaatgaggaacagcacgcccgcaataatgaggaccgttgcagatcgcttcataaaaacagcccacacctttccgctaaactcgcatgttgaaataatgtctacccaatcatatgcacccatccgccatcgcggattcatcagctcactcgagggactacgcgcaatcgcctccctgggagtcttggcgacccacgttgcattccaaacctccgtcgaccccgccagcaacatcggtgcagtactcgcgcgtttcgactttttcgtcgccgtcttcttcgccctctccgccttcgttctttggcgacgccgcgccgggcaaccagtgggactgtactacctcaaacgcctagcccgcatcatgcccgcatactgggcaacggtcattgcagtcctgctgtttattcccaccggcccctggttagccaacctgacgatgacccaaatctactggccagacgggctcatgacaggcctcacccacctttggtccctgtgcgtggaagtggcgttttacctggtgatgccgcttctcgcgtgggtgttggataggtttggtcggccggtgcgcatcctgttgattgttggtggggcagtgttgagtctggcgtggccgtggattccccttgtggagcatgcgttggacgaggggtgggcgaacatgcagatctggccacccgcttacgcttgctggtttgcagtcggcatgatcgccgcagaaattgaaggagttcgattcccacgggttccgagctttgtgtgggtgggtttagctttagtggtcgcttggatcgcgggccaagaatggttcggaccactaggtttagtgcaccccagcccctgggaattcaacttaagagtcctcgcgggcacacttttcgctgtatttctggtggttccctacgcgctgggtacgccctctcggcttcttgattccagttggatgaaaacgctcggcacctggtcgtattccatcttcctctggcaccttcccgtgctgacgattgtgttcccactgctcgggttgcctttatttagtggaaatttcctgttggtgttcatcgtgacggtcttgttgacgatcccagttgccgccatcagctacaccttcatcgaagagcccatcagcggtggacccggcgcgccattcaggctgggggtcgttaggattcaccatttttctgggggtaggtctggaaaatgatgaattggcaccacgtcaag

SEQ ID NO: 272 - protein, 368 aa, Corynebacterium glutamicum
MSTQSYAPIRHRGFISSLEGLRAIASLGVLATHVAFQTSVDPASNIGAVLARFDFFVAVFFALSAFVLWRRRAGQPVGLYYLKRLARIMPAYWATVIAVLLFIPTGPWLANLTMTQIYWPDGLMTGLTHLWSLCVEVAFYLVMPLLAWVLDRFGRPVRILLIVGGAVLSLAWPWIPLVEHALDEGWANMQIWPPAYACWFAVGMIAAEIEGVRFPRVPSFVWVGLALVVAWIAGQEWFGPLGLVHPSPWEFNLRVLAGTLFAVFLVVPYALGTPSRLLDSSWMKTLGTWSYSIFLWHLPVLTIVFPLLGLPLFSGNFLLVFIVTVLLTIPVAAISYTFIEEPISGGPGAPFRLGVVRIHHFSGGRSGK

SEQ ID NO: 273 - DNA, 1089 bp, Corynebacterium glutamicum
  CDS (101)..(1066): RXS02741
actggtcacctggtttggtctgcactctgactcccctcaaaagggcacaatttggtcaatttcccaaccttgtctttcagtcatggttagtgtgggaaccatgaaggcaatcttagtttcccgcaccggcggaccagaggtgttggagttcaccgacactgacgccccaaagcccactgatgatcaggttttagttgaagttgatatggctggcgtcaactttattgatacttactatcgccagggtgaatatcacgctcgcctgccgtttatcccaggttttgaaggcactggtcgggtgttggaggatccgcaggggttgattgcggcgggtaccaaggtggcgtggtgtgatgccatgggttcgtatgctcagcaggtgtgtgtgccgcgggatcgcttggtggcggttcccgagggcgtgagttcggaagtggctgcgtcgatgttgatgcagggaatcactgcgcattatctaaccaatggtgtgtatgagcttgaagagggcgattcttgcctcatcactgctggcgcgggtggtgttggattgttggctacgcagatggcggcggccaagggagtgcgcgtgtacagcgtggtgtccacggatgaaaaagctgagcttgctttggatgccggtgcttatgaggtgtttcgttattccgataatttggcggagcaggttcgtcggcacaacgggggtcgcggagttgatgtggtgtatgacggtgtcggccagtccacgttcaatgagtccttagaggctgttcgtccgcgcggcactgtgtgtttgtttggtgcggcgtcgggtcctgtggagccttttgatccgcagctgttgaacactcacggttcgatcttcttgacccgcccaagcattggcgcgtggacgtctgaggagggcgaatttgccaagcgtgcacaggcggtcacgcaggccatcgtcgaaggcaccttgcgggttcgcgttactggcacatattcgcttgccgacgcctacatcgcccaccgcgaccttcaggcgcgtagcacgagcggttctttggtcttggaaatcccgaaggactaaacacgcataaaaagatcctg

SEQ ID NO: 274 - protein, 322 aa, Corynebacterium glutamicum
MKAILVSRTGGPEVLEFTDTDAPKPTDDQVLVEVDMAGVNFIDTYYRQGEYHARLPFIPGFEGTGRVLEDPQGLIAAGTKVAWCDAMGSYAQQVCVPRDRLVAVPEGVSSEVAASMLMQGITAHYLTNGVYELEEGDSCLITAGAGGVGLLATQMAAAKGVRVYSVVSTDEKAELALDAGAYEVFRYSDNLAEQVRRHNGGRGVDVVYDGVGQSTFNESLEAVRPRGTVCLFGAASGPVEPFDPQLLNTHGSIFLTRPSIGAWTSEEGEFAKRAQAVTQAIVEGTLRVRVTGTYSLADAYIAHRDLQARSTSGSLVLEIPKD

SEQ ID NO: 275 - DNA, 430 bp, Corynebacterium glutamicum
  CDS (101)..(430): RXS03061
ctgccaccactggtcattgcagaggacactctccgtgatggtcttcaggtgttagtcgcagccctagagcgcgaaaccgcgcaccagaaggtgggctaaagtgtctttgaccttcccagtaatcaaccccagcgatggctccaccatcaccgagctagaaaaccacgattccacccagtggatgtccgcgctctctgatgcagttgcagctggtccttcatgggctgcgaaaactccccgcgaaagatccgtggtactcaccgcaatcttcgaagcactgaccgaacgcgcccaagaacttgcagagatcatccacctggaagctggaaaatccgatgcagaagctcttggtgaagtcgcttatggtgcagaatacttccgttggtttgcggaagaagcagtgcgcctgcccggccgctacggacagtca

SEQ ID NO: 276 - protein, 110 aa, Corynebacterium glutamicum
VSLTFPVINPSDGSTITELENHDSTQWMSALSDAVAAGPSWAAKTPRERSVVLTAIFEALTERAQELAEIIHLEAGKSDAEALGEVAYGAEYFRWFAEEAVRLPGRYGQS

SEQ ID NO: 277 - DNA, 747 bp, Corynebacterium glutamicum
  CDS (101)..(724): RXS03150
tttaacagagtgcgtttcaatgcctgtagtgttccggcaattttgaatgtcgttacggttacccaaggctgaattcctgagctcaccttgtacaagatcagtggaagcccagttcacctctcccctgctcaacaatgggcaaacctgtttccttggtacccgaatccttgctccaaaatcacgttacgcggaagtagtcgatgcattcaccgctttcgctggcagcctgcaggttggagtcacgtcctcccctgacactcagatcggaccgatggcgactgcccggcagcgtgagcgcgtggaatcctacatttcccaaggcaaaaatgctggagcccgcatcactgtcggtggcagccgtccacgagatcttgacgccggattcttcgttgagccaacagtgttcgccgatgtagacaatcgcgcagccattgcccaagatgaaatcttcggaccggtgccctctgttgtttcctaccaagacgatgaacacgccatccaactagccaacgattccgaattcggtctcggcggaactgtctggacgagcgatcccgagcgcggcgctgcattggcccgccgagttcacacaggaaccattggcatcaaccgctatatccctgatcccgccgcaccatttggaggtgtgaaaaacagtggccttggcagagaactcggccccgaaggtcttgcttcctaccaagaaacccaaaccatttatctctaatccaaactgcacctatatat

SEQ ID NO: 278 - protein, 208 aa, Corynebacterium glutamicum
VEAQFTSPLLNNGQTCFLGTRILAPKSRYAEVVDAFTAFAGSLQVGVTSSPDTQIGPMATARQRERVESYISQGKNAGARITVGGSRPRDLDAGFFVEPTVFADVDNRAAIAQDEIFGPVPSVVSYQDDEHAIQLANDSEFGLGGTVWTSDPERGAALARRVHTGTIGINRYIPDPAAPFGGVKNSGLGRELGPEGLASYQETQTIYL

SEQ ID NO: 279 - DNA, 747 bp, Corynebacterium glutamicum
  CDS (101)..(724): RXS02554
gcttttgaagtgtgtcgcgtgtgcggactgaaatagtttccgcttcaacttggttgctaaggataggctccataaaaataaccaaaggcggaaaatttcaatgtcacacactaagccatccattgccatcctcggtgctggccgagtgggttcttcacttgccaggtcagcggtcgccgcaggctatgaggtaaaggttgctggttcaggtgctgtggacaaaatcgctcttaccgctgagatccttatgcccggcgcggttccaagcactgctgaccaggctgtaaaggatgcagatattgtgttcttggctgttcccctgcataaattccgcagtgtcaatccagccactttagagggcaagatcgttattgacacgatgaaccactgggttccggtcaatggtgagttggaggaaattgatcaggatccgcgcagcacttcggagattattgcggagtttttcgcgggatcaaccatggtgaagtcttttaaccacattggttatcacgagattgagcaggatgcgggtaccgggcgtgcgattgcgtatgccacggatgatgtggatgcaggtgcccaggttgcacagctaattaagagttttgggtttgttcctttaaatattggcgcattggaaaacggccgtattctggaacctggccaagaagctttcggcgcgcaccttaataaagattcgcgcctagaacttgttaatcagcggtagtacctcgatcttcagccaac

SEQ ID NO: 280 - protein, 208 aa, Corynebacterium glutamicum
MSHTKPSIAILGAGRVGSSLARSAVAAGYEVKVAGSGAVDKIALTAEILMPGAVPSTADQAVKDADIVFLAVPLHKFRSVNPATLEGKIVIDTMNHWVPVNGELEEIDQDPRSTSEIIAEFFAGSTMVKSFNHIGYHEIEQDAGTGRAIAYATDDVDAGAQVAQLIKSFGFVPLNIGALENGRILEPGQEAFGAHLNKDSRLELVNQR

SEQ ID NO: 281 - DNA, 606 bp, Corynebacterium glutamicum
  CDS (101)..(583): RXS03058
acgagcttccgctctgcacaagccgctagaagccccgcatagccctaatgtagagctcatgcccatttggaatcacaacaccgcatatcggccatggctggtgtcaaagctcaaaggctcaagatcgcttctcgacgtcggctccggcgatcactccttcgccgacctggccggccgccaggtcgcgcatgtcgatgtcgtggatcctcttattaatacaacctttgaagaattccagccgacccaaagctacgatgccatcacgttcatcgcgtccctccatcacatgaacgcggaagaaggacttaacaaagcagtccgaatcctcaatcctggcggcaagctcctcatcgtaggcctcgccaaaaacaaaaccgcctccgactggatcatctccggactacaagcttttctctcccgaccaatcagcctcatcaatagggaacaacaaatctaccccttccctaccaaagaaccctcagagagtctccacgaaatacgacaactcaccaagcagctcctccctcaccgccgtattcgccgtggaatccacttccgatacctcctcgagtggacaaagccttaaacagccctataaaccaaaaa

SEQ ID NO: 282 - protein, 161 aa, Corynebacterium glutamicum
VSKLKGSRSLLDVGSGDHSFADLAGRQVAHVDVVDPLINTTFEEFQPTQSYDAITFIASLHHMNAEEGLNKAVRILNPGGKLLIVGLAKNKTASDWIISGLQAFLSRPISLINREQQIYPFPTKEPSESLHEIRQLTKQLLPHRRIRRGIHFRYLLEWTKP

SEQ ID NO: 283 - DNA, 544 bp, Corynebacterium glutamicum
  CDS (101)..(514): RXS03218
ttggtacgggggttaacaacctagctttgtatctgaaggcttcggagatttcctgtatacatcaacaattgccctttaaccaggagtattcttagcttctatgactcctgatcttgcagcttttctggacaaactttatgccgaggggcaggaatttgatgcagagcaaccggatcggcttgatcgcaggagaaaccttgaatctgaaagcgctgcgctacttcgctcgctcatctacggaattagtccaaagtcagttctcgagctaggcacatccaatggttactcgactatttggatggcagatgtcgtgaatttaacaacagtagacaatgatcctgagcggtctttggatgctgcagcaaaccttcgcgccgctggagttgaagaaaaagttcaacgaatcgtcgccgatggagcaaccgtacttgccgattccgccgatgaacaatgggatttcattttccttgatgccgaacaatcactctatgtaaattggtggcctgacctgcaatgagttctagcaaatggcggcttgttagtg

SEQ ID NO: 284 - protein, 138 aa, Corynebacterium glutamicum
MTPDLAAFLDKLYAEGQEFDAEQPDRLDRRRNLESESAALLRSLIYGISPKSVLELGTSNGYSTIWMADVVNLTTVDNDPERSLDAAANLRAAGVEEKVQRIVADGATVLADSADEQWDFIFLDAEQSLYVNWWPDLQ

SEQ ID NO: 285 - DNA, 537 bp, Corynebacterium glutamicum
  CDS (101)..(514): FRXA01918
ttggtacgggggttaacaacctagctttgtatctgaaggcttcggagatttcctgtatacatcaacaattgccctttaaccaggagtattcttagcttctatgactcctgatcttgcagcttttctggacaaactttatgccgaggggcaggaatttgatgcagagcaaccggatcggcttgatcgcaggagaaaccttgaatctgaaagcgctgcgctacttcgctcgctcatctacggaattagtccaaagtcagttctcgagctaggcacatccaatggttactcgactatttggatggcagatgtcgtgaatttaacaacagtagacaatgatcctgagcggtctttggatgctgcagcaaaccttcgcgccgctggagttgaagaaaaagttcaacgaatcgtcgccgatggagcaaccgtacttgccgattccgccgatgaacaatgggatttcattttccttgatgccgaacaatcactctatgtaaattggtggcctgacctgcaatgagttctagcaaatggcggctt

SEQ ID NO: 286 - protein, 138 aa, Corynebacterium glutamicum; identical to SEQ ID NO: 284

SEQ ID NO: 287 - DNA, 672 bp, Corynebacterium glutamicum
  CDS (101)..(649): RXC00110
atatcgaatgtccagtcacgctaaacttcacccaagatgagatttcgtggcacgattgggaataacgaacgctaattttaaacactggaggagcttccacgtgagcaacaaagacggcctttttactgacggtaacagcacgtttgcacctaaggtggattcaattcccctcagcgatgtggataccagcgttagcggtgaagcctccatcggcacgctgatctccaacgcaacctcccaaatgtccagccttttccgcgcagaagttgagctggcgaagactgaactcgcaggcgaagccaagaaagctgccatcggcggcggcgcattcagcgttgctggcgtaatcgcactgtacagctccttcttctttttcttcttcgtcgcagcactgctgagcgagtggattaagccttgggcagcattcctcatcgtgttcctcttcatgctggtcatcgccgcagctctcgcactgttcggctggcgcaaggtgaagaagatgggcgctccgaagaacaccatccaatcggtcaaccaactgaagaacctggtcccaggtcaggcatccgagaagctggagaaggccaacaagcgtggcctctacacctccgcgtccttccacagccccggcgccatcactggcgaccactaaaaaaggagacttcgatggcc

SEQ ID NO: 288 - protein, 183 aa, Corynebacterium glutamicum
VSNKDGLFTDGNSTFAPKVDSIPLSDVDTSVSGEASIGTLISNATSQMSSLFRAEVELAKTELAGEAKKAAIGGGAFSVAGVIALYSSFFFFFFVAALLSEWIKPWAAFLIVFLFMLVIAAALALFGWRKVKKMGAPKNTIQSVNQLKNLVPGQASEKLEKANKRGLYTSASFHSPGAITGDH

SEQ ID NO: 289 - DNA, 954 bp, Corynebacterium glutamicum
  CDS (101)..(931): RXC01971
aggtcttgtttatttcggctactgattcagtagctgcgctccgataggattcttagttttcagttcagtatctttgagccacggctagaatgtgaatcctatgtctaagaagaagcctcgccccattccggttcctgcccaatttatccctggtctcattgatgcgcatacacatttggcatcgtgtggaggagatcttgcagggttggtggaaagggccaaggaggcgggcgtcgaaaagctttgtaccgtcggtgatggtttggctgaggccgagcttgcgctggaggccgcgcaacagtttggcaatgtgtttgctgcgtgtgcgattcatccgacgaaggctgatcagttggatggggctgcgcgtgcgcggctgacgcagatggcggcggatccgaattgtgtggccattggtgagactggtttggattcgtattggatcaagcacgatccagaggacacggcggcgttggatgtgcaagaggaggcgctgcgctggcatattgatttggcaattagtgcggataagccgttgatgattcacaatcgtgaggcggatgctgatttgatgcgagtgttggcggatgctccacctccaaaagatacgattctgcattgtttttcttcgccgttggacgtggcgaaggaagcgttggatcgtggatatgtgttgagttttgcgggcaatgtgacgtttaagcgtaatgaggagttgcgggaggctgctcgtattgcgccgatttcccagattttgattgaaaccgatgcgccgtatatgacgccggagccgtttcgggggagtaggaatgagccgtcgttgattggtcatacggcgctatgcattgcggaggttcgggggatggctgtggaggatgttgcggcggctttgaatgagaattttgatcgcgtttatggggtcacaaatctataacgtgaggtagctcacagtca

SEQ ID NO: 290 - protein, 277 aa, Corynebacterium glutamicum
MSKKKPRPIPVPAQFIPGLIDAHTHLASCGGDLAGLVERAKEAGVEKLCTVGDGLAEAELALEAAQQFGNVFAACAIHPTKADQLDGAARARLTQMAADPNCVAIGETGLDSYWIKHDPEDTAALDVQEEALRWHIDLAISADKPLMIHNREADADLMRVLADAPPPKDTILHCFSSPLDVAKEALDRGYVLSFAGNVTFKRNEELREAARIAPISQILIETDAPYMTPEPFRGSRNEPSLIGHTALCIAEVRGMAVEDVAAALNENFDRVYGVTNL

SEQ ID NO: 291 - DNA, 465 bp, Corynebacterium glutamicum
  CDS (101)..(442): RXA02118
gggctggtgcgggttgctttaatggaggtcatgctcgcaggctaacagaattggtggttttagtgctgttaccagggacatcggctagaatctgctgaatatgtctgatcaattagctccctgccctgagtgcagcagtgaatatacctacgaaaacggcggcgttctggtctgcccaatgtgtgcccacgaatgggtcgaaggtgaagtagcggaagaaaccgcgactgtcatcaaagactctgtgggaaatatcctcaatgatggcgattccgtatcgattgtgaagagcctcaaagtcaagggtggcggtgccatcaagattggcaccaaagtcagcggaattcgtcttcttgaagagccagttgacggccacgacatcgacgctaaggtccctggatttggtcaaatgcgactcaagtccagtgttgtaaagaaggcctaaacccttttaaggagctttag

SEQ ID NO: 292 - protein, 114 aa, Corynebacterium glutamicum
MSDQLAPCPECSSEYTYENGGVLVCPMCAHEWVEGEVAEETATVIKDSVGNILNDGDSVSIVKSLKVKGGGAIKIGTKVSGIRLLEEPVDGHDIDAKVPGFGQMRLKSSVVKKA

SEQ ID NO: 293 - DNA, 537 bp, Corynebacterium glutamicum
  CDS (101)..(514): RXA00078
cggtgctgaggagggtgacatgtctggaagcagattgacgcatgctttctagcgtaatgtgggtcacagaaaatgctctcgcttggaaggcaggaatccgatgaaagccgatctcaccccgtaccgtcagttcaatggaaatgccaaagaagcaatggagttctaccaaacagtttttggtggcgagcttcagatgatgccgttttccgccatgcattctgaggaggaagttggtggtgacggcgagaaaatcatgcacgctgagctggtcgttgatggtcagaagttgctttttgccagtgatattccgcgcgtgatgcaacgaatgaagggcgaggacactccgttgtcgctgactggtggcgctgagctggaagaggaaattcgtggctactgggagaagttgtctgagggcggcaccgtgaccatgcctttggaagctgttccttggggtgcggtttatggtgcgctggaggatcgctttggaactcactggatgttcaacatcggtggctaaaacttttggaaacttattga

SEQ ID NO: 294 - protein, 138 aa, Corynebacterium glutamicum
MKADLTPYRQFNGNAKEAMEFYQTVFGGELQMMPFSAMHSEEEVGGDGEKIMHAELVVDGQKLLFASDIPRVMQRMKGEDTPLSLTGGAELEEEIRGYWEKLSEGGTVTMPLEAVPWGAVYGALEDRFGTHWMFNIGG

SEQ ID NO: 295 - DNA, 391 bp, Corynebacterium glutamicum
  CDS (101)..(391): RXA02105
gcgggcgtcgaaaagcggcgacctgcggatctgtgacccgcgccataaatgggtacgatggcggttggaaaattccgtaacttctttgagggagaaacccatggtcggcacgatttccacctacatcgcattcaatggaaacaccacggaagctctgaaacattggcaagaggtttttggtggtgaacttaatcttttaacctacggtcagctcaccttggaaggtatgccgtttgatcctccagcggatgcgttggcgcacggcgtcctcacgttggacaatggtggtttgatttctggcagtgattcttttgagggagaaatgctcgtcaaagacaccgcgtactccatgttgtataacgcggagtcagtggaagatggtcgcgcgcgg

SEQ ID NO: 296 - protein, 97 aa, Corynebacterium glutamicum
MVGTISTYIAFNGNTTEALKHWQEVFGGELNLLTYGQLTLEGMPFDPPADALAHGVLTLDNGGLISGSDSFEGEMLVKDTAYSMLYNAESVEDGRAR

SEQ ID NO: 297 - DNA, 1497 bp, Corynebacterium glutamicum
  CDS (101)..(1474): RXN00663
ctgaacgattggtgaccggctcatgaaaacttgacgagtccccggtattcgccagcggtgactactaccgtgggcgacaagcccacttagaggaggacttgtgacaaccacctatccagatttccttggaaattcttcgctccaaacagatacggagcactgggaaatggaaggaggtgcgcaggaagtctctgttacttatgttttggacacgtcagtgttgctgtctgatccgttgtcgttgacacggttcgcggagcacgatgtagttctgccaattgttgtaattacggaattagaagccaagcgtcatcacccggaccttggcttttttgctcgccaagcgcttcggatgctggatgagctgcgtgagatccatggggatttgtccaagccactgccaattggcgatgaaggcggacacatccatgttgagctgaatcaccaaaacacggggtccttgcccgtgggattccgccttggtgacaatgacacccgcatccttgcagtggccaagaatctgcaggaagagggccacaatgtggttctggtgtcgaaggacctgccgatgcggattaaggcgtcggcaagcggaatcgccgcacaggaataccgcgctgccctggcgcgcgaccgtggttacaccggcatgacccacgccaatatcaccgatgaccagctcagcgagctctacgacaccggcgaggtgcgcattgaggagctcgaaaagctgcccgtcaaccacggcttcaccctcaaatccaacagcggttcggcgcttggtcgtatgaattccgacaagatcatcgagcttgtccccggcgaccagcaggtattcggtatcagcgggcgtagcgctgagcagcgggttgccattgatttgcttaacgacgacgccgtcggcatcgtatccatcggcggccccgcgggtacaggtaaaagcgcactcgcactgtgtgccggcctggaagctgtgatggagcgtcgcattcagcgcaagattatcgtgttccgcccactctttgccgttggcggacaggaacttggctacctgcctggcgaccaagaagaaaaaatggggccttgggcgcaagcggtttttgacaccctaagctccatggtcagccaaaacatcatcgatgaagccctctcccgcggcctcatcgaagttctcccacttactcacatccgcggacgctcactccacgatgctttcgtcatcgtcgacgaggcccaatccctagaacgcaacgtgttgctcaccatgctgtctcgcatcggccagaattcccgagtagttctcacccatgacgtagcgcagcgcgacaacctgcgcgttggtcgctacgacggcatcgtctctgtggtggaagcactcaaggatcacgaactgtttggccacatcacgttgcagcgttccgaacgctcccgaatcgctgagttggtcacccaagttttggatgcgccgtctctgtagtcgcgcagtctgtggcgatt

SEQ ID NO: 298 - protein, 458 aa, Corynebacterium glutamicum
VTTTYPDFLGNSSLQTDTEHWEMEGGAQEVSVTYVLDTSVLLSDPLSLTRFAEHDVVLPIVVITELEAKRHHPDLGFFARQALRMLDELREIHGDLSKPLPIGDEGGHIHVELNHQNTGSLPVGFRLGDNDTRILAVAKNLQEEGHNVVLVSKDLPMRIKASASGIAAQEYRAALARDRGYTGMTHANITDDQLSELYDTGEVRIEELEKLPVNHGFTLKSNSGSALGRMNSDKIIELVPGDQQVFGISGRSAEQRVAIDLLNDDAVGIVSIGGPAGTGKSALALCAGLEAVMERRIQRKIIVFRPLFAVGGQELGYLPGDQEEKMGPWAQAVFDTLSSMVSQNIIDEALSRGLIEVLPLTHIRGRSLHDAFVIVDEAQSLERNVLLTMLSRIGQNSRVVLTHDVAQRDNLRVGRYDGIVSVVEALKDHELFGHITLQRSERSRIAELVTQVLDAPSL

SEQ ID NO: 299 - DNA, 1019 bp, Corynebacterium glutamicum
  CDS (1)..(996): FRXA00663
cttggtgacaatgacacccgcatccttgcagtggccaagaatctgcaggaagagggccacaatgtggttctggtgtcgaaggacctgccgatgcggattaaggcgtcggcaagcggaatcgccgcacaggaataccgcgctgccctggcgcgcgaccgtggttacaccggcatgacccacgccaatatcaccgatgaccagctcagcgagctctacgacaccggcgaggtgcgcattgaggagctcgaaaagctgcccgtcaaccacggcttcaccctcaaatccaacagcggttcggcgcttggtcgtatgaattccgacaagatcatcgagcttgtccccggcgaccagcaggtattcggtatcagcgggcgtagcgctgagcagcgggttgccattgatttgcttaacgacgacgccgtcggcatcgtatccatcggcggccccgcgggtacaggtaaaagcgcactcgcactgtgtgccggcctggaagctgtgatggagcgtcgcattcagcgcaagattatcgtgttccgcccactctttgccgttggcggacaggaacttggctacctgcctggcgaccaagaagaaaaaatggggccttgggcgcaagcggtttttgacaccctaagctccatggtcagccaaaacatcatcgatgaagccctctcccgcggcctcatcgaagttctcccacttactcacatccgcggacgctcactccacgatgctttcgtcatcgtcgacgaggcccaatccctagaacgcaacgtgttgctcaccatgctgtctcgcatcggccagaattcccgagtagttctcacccatgacgtagcgcagcgcgacaacctgcgcgttggtcgctacgacggcatcgtctctgtggtggaagcactcaaggatcacgaactgtttggccacatcacgttgcagcgttccgaacgctcccgaatcgctgagttggtcacccaagttttggatgcgccgtctctgtagtcgcgcagtctgtggcgatt

SEQ ID NO: 300 - protein, 332 aa, Corynebacterium glutamicum
LGDNDTRILAVAKNLQEEGHNVVLVSKDLPMRIKASASGIAAQEYRAALARDRGYTGMTHANITDDQLSELYDTGEVRIEELEKLPVNHGFTLKSNSGSALGRMNSDKIIELVPGDQQVFGISGRSAEQRVAIDLLNDDAVGIVSIGGPAGTGKSALALCAGLEAVMERRIQRKIIVFRPLFAVGGQELGYLPGDQEEKMGPWAQAVFDTLSSMVSQNIIDEALSRGLIEVLPLTHIRGRSLHDAFVIVDEAQSLERNVLLTMLSRIGQNSRVVLTHDVAQRDNLRVGRYDGIVSVVEALKDHELFGHITLQRSERSRIAELVTQVLDAPSL

SEQ ID NO: 301 - DNA, 1140 bp, Corynebacterium glutamicum
  CDS (101)..(1117): RXA00888
atggtggcgctcgcagctatcggcgtgctgtctgaccgctggtaacatttctctgacataacctttcttgaacattccgaaagcaggccgaactagcactgtgactgccccgcgaaaaacccgcacagaagtaatcaccactgtcctcaatctagaacgcacgctcgcgcaaaccgttttaggaatcaacgacgaaaacctgcgtgtgttggacaatcaaattgattgcgatattcacgtgcgtggcacccacgtggaactcaccgggccagcccacgaagtctcccgcgcctcgaaaatatttgaggaactgcaggcgattgcccgtcgaggacatgtgattagccctgagacagtaaaaaatgtcatcagcatgattaacgtggagacgccgcaaaccgtctctgaaatcttgaccggcgatatccttgctcgccgtggcaaagtgatccgccctaagacgcttggccaaaagcactacgtggacgcgattgataccaacacgattgtgttcggtctgggcccagccggttccggtaaaacctatctggccatggcaaaagccgtccaagcgctgcaatcaaagcaggtcagccgcatcatcttgacccgccccgcagtggaagccggcgagaaactcggcttcttgcccggcaccctgaacgaaaagatcgacccctacctgcgcccgcttcacgacgcgctgcgcgacatggtcgaaccagaagtcattccaaaactcatggaagccggcatcgtagaagtcgccccacttgcctacatgcgcggacgcaccctcaacgatgcattcgtgatcctggatgaagcccagaacaccaccccagcacagatgaagatgttcctcacccgcctgggattcggttccaaaatggtagtcacaggtgacatcacccaggtggacctcccaggaggccaaaagtccggcctgcgcctggttcgccacatcctgcgcggagtagacgatgtgcacttctccgagctcacctcatccgacgtggtccgccaccaactggttggacacattgtggatgcatacgaagactatgaagaacgcgaggcccgcgaattgaaacgcaaacgccaggagacacggccatgagcattgaggtattcaacgaa

SEQ ID NO: 302 - protein, 339 aa, Corynebacterium glutamicum
VTAPRKTRTEVITTVLNLERTLAQTVLGINDENLRVLDNQIDCDIHVRGTHVELTGPAHEVSRASKIFEELQAIARRGHVISPETVKNVISMINVETPQTVSEILTGDILARRGKVIRPKTLGQKHYVDAIDTNTIVFGLGPAGSGKTYLAMAKAVQALQSKQVSRIILTRPAVEAGEKLGFLPGTLNEKIDPYLRPLHDALRDMVEPEVIPKLMEAGIVEVAPLAYMRGRTLNDAFVILDEAQNTTPAQMKMFLTRLGFGSKMVVTGDITQVDLPGGQKSGLRLVRHILRGVDDVHFSELTSSDVVRHQLVGHIVDAYEDYEEREARELKRKRQETRP

SEQ ID NO: 303 - DNA, 1506 bp, Corynebacterium glutamicum
  CDS (101)..(1483): RXA01437
actatgtaagaaatcacaacctcccctcattagtgccaggaggcacaagcctgaagtgtcatcaatgagaaggttcaggctgaaattagaaaggcgatgtatgtctgacacaccgacctcagctctgatcaccacggtcaaccgcagcttcgatggattcgatttggaagaagtagcagcagaccttggagttcggctcacctacctgcccgacgaagaactagaagtatccaaagttctcgcggcggacctcctcgctgaggggccagctctcatcatcggtgtaggaaacacgtttttcgacgcccaggtcgccgctgccctcggcgtcccagtgctactgctggtagacaagcaaggcaagcacgttgctcttgctcgcacccaggtaaacaatgccggcgcagttgttgcagcagcatttaccgctgaacaagagccaatgccggataagctgcgcaaggctgtgcgcaaccacagcaacctcgaaccagtcatgagcgccgaactctttgaaaactggctgctcaagcgcgcacgcgcagagcactcccacattgtgctgccagaaggtgacgacgaccgcatcttgatggctgcccaccagctgcttgatcaagacatctgtgacatcacgatcctgggcgatccagtaaagatcaaggagcgcgctaccgaacttggcctgcaccttaacactgcatacctggtcaatccgctgacagatcctcgcctggaggaattcgccgaacaattcgcggagctgcgcaagtcaaagagcgtcactatcgatgaagcccgcgaaatcatgaaggatatttcctacttcggcaccatgatggtccacaacggcgacgccgacggaatggtatccggtgcagcaaacaccaccgcacacaccattaagccaagcttccagatcatcaaaactgttccagaagcatccgtcgtttcttccatcttcctcatggtgctgcgcgggcgactgtgggcattcggcgactgtgctgttaacccgaacccaactgctgaacagcttggtgaaatcgccgttgtgtcagcaaaaactgcagcacaatttggcattgatcctcgcgtagccatcttgtcctactccactggcaactccggcggaggctcagatgtggatcgcgccatcgacgctcttgcagaagcacgccgacttaacccagaactatgcgtcgatggaccacttcagttcgacgccgccgtcgacccgggtgtggcgcgcaagaagatgccagactctgacgtcgctggccaggcaaatgtgtttatcttccctgacctggaagccggaaacatcggctacaaaactgcacaacgcaccggtcacgccctggcagttggtccgattctgcagggcctaaacaaaccagtcaacgacctttcccgtggcgcaacagtccctgacatcgtcaacacagtagccatcacagcaattcaggcaggaggacgcagctaatggcattggcacttgttttg

SEQ ID NO: 304 - protein, 461 aa, Corynebacterium glutamicum
MSDTPTSALITTVNRSFDGFDLEEVAADLGVRLTYLPDEELEVSKVLAADLLAEGPALIIGVGNTFFDAQVAAALGVPVLLLVDKQGKHVALARTQVNNAGAVVAAAFTAEQEPMPDKLRKAVRNHSNLEPVMSAELFENWLLKRARAEHSHIVLPEGDDDRILMAAHQLLDQDICDITILGDPVKIKERATELGLHLNTAYLVNPLTDPRLEEFAEQFAELRKSKSVTIDEAREIMKDISYFGTMMVHNGDADGMVSGAANTTAHTIKPSFQIIKTVPEASVVSSIFLMVLRGRLWAFGDCAVNPNPTAEQLGEIAVVSAKTAAQFGIDPRVAILSYSTGNSGGGSDVDRAIDALAEARRLNPELCVDGPLQFDAAVDPGVARKKMPDSDVAGQANVFIFPDLEAGNIGYKTAQRTGHALAVGPILQGLNKPVNDLSRGATVPDIVNTVAITAIQAGGRS

SEQ ID NO: 305 - DNA, 1248 bp, Corynebacterium glutamicum
  CDS (101)..(1225): RXN00778
aggtcttaggtttttaagtcgtgagcaatccggagggaaactagcccgcctacaggatctgctcagacgatgtcttcacttaaaccggaaaggcttccccgtgaacctcactcttaagcgctccatcgcccttgtgggcgcagttactgcaggctccttcgctcttgtagcttgctccgactccaatgagtctgattccacctcctcatctgcagcttccaccggttcttccgatgctgcatccattgagggcctttccggtgttaccggtcagctcgttgctgaaggtgcatcttcccagcagtccgcaatggactactttggtatccgttactccgaggctgtcagcggtgcatctctggcttacaccccttcaggttccggttccggccgcaccaacttcgctgcaggccaggttgctttcggtggctccgactccgcaatgaaggacgaccaggctgcagaagcagaagcacgttgcaacggcaacgaagcatggcacctgccattcgttatcggcccagttgcagttgcttacaacctgcctggcgttgacaccctgaacctggacaccaacatcatcgctcagatcttcaagggcgagatcaccaagtggaacgacgaagcaatcgcttcccagaacgagggcaccgacctcccagaccaggacatctccgttctgtaccgttccgaagagtccggtacctccgacaacttccagaagttcctcggagcttccaccgacatctgggagaccgaaggccagcagttcccaaccgaggttggctccggtgcgcagggctccaacggtgtagcttctgaggcttccaacatcgagggtgcaatcacctacgttgaagctggtttcgctaaccagtccggcctgggcgttgcaaacatcgacttcggttccggcccagttgaactcaacgctgagtccgttggcgttgcacttggtgcactcgacttcctgactgagggccacaacatggttgttgacaccgacgctatgttcgcaatgaacgaagccggtgcttacccactgatcctcaccacctacgaaatcgtctgctccgcaggctacgacgagaccacccgcgaccaggtcaaggacttcctgaccgttgcactggactcccaggatgaccagctcgaggctctcggctacatcccagttaccggcgagcactacgatcgcctcgttgcagcagttgaagcaattcagtaataaaccgctgccgtagcttc

SEQ ID NO: 306 - protein, 375 aa, Corynebacterium glutamicum
VNLTLKRSIALVGAVTAGSFALVACSDSNESDSTSSSAASTGSSDAASIEGLSGVTGQLVAEGASSQQSAMDYFGIRYSEAVSGASLAYTPSGSGSGRTNFAAGQVAFGGSDSAMKDDQAAEAEARCNGNEAWHLPFVIGPVAVAYNLPGVDTLNLDTNIIAQIFKGEITKWNDEAIASQNEGTDLPDQDISVLYRSEESGTSDNFQKFLGASTDIWETEGQQFPTEVGSGAQGSNGVASEASNIEGAITYVEAGFANQSGLGVANIDFGSGPVELNAESVGVALGALDFLTEGHNMVVDTDAMFAMNEAGAYPLILTTYEIVCSAGYDETTRDQVKDFLTVALDSQDDQLEALGYIPVTGEHYDRLVAAVEAIQ

SEQ ID NO: 307 - DNA, 857 bp, Corynebacterium glutamicum
  CDS (1)..(834): FRXA00778
cgcaacaacttcgctgcagcccaggttgctttcggtggctccgactccgcaatgaaggacgaccaggctgcagaagcagaagcacgttgcaacggcaacgaagcatggcacctgccattcgttatcggcccagttgcagttgcttacaacctgcctggcgttgacaccctgaacctggacaccaacatcatcgctcagatcttcaagggcgagatcaccaagtggaacgacgaagcaatcgcttcccagaacgagggcaccgacctcccagaccaggacatctccgttctgtaccgttccgaagagtccggtacctccgacaacttccagaagttcctcggagcttccaccgacatctgggagaccgaaggccagcagttcccaaccgaggttggctccggtgcgcagggctccaacggtgtagcttctgaggcttccaacatcgagggtgcaatcacctacgttgaagctggtttcgctaaccagtccggcctgggcgttgcaaacatcgacttcggttccggcccagttgaactcaacgctgagtccgttggcgttgcacttggtgcactcgacttcctgactgagggccacaacatggttgttgacaccgacgctatgttcgcaatgaacgaagccggtgcttacccactgatcctcaccacctacgaaatcgtctgctccgcaggctacgacgagaccacccgcgaccaggtcaaggacttcctgaccgttgcactggactcccaggatgaccagctcgaggctctcggctacatcccagttaccggcgagcactacgatcgcctcgttgcagcagttgaagcaattcagtaataaaccgctgccgtagcttc

SEQ ID NO: 308 - protein, 278 aa, Corynebacterium glutamicum
RNNFAAAQVAFGGSDSAMKDDQAAEAEARCNGNEAWHLPFVIGPVAVAYNLPGVDTLNLDTNIIAQIFKGEITKWNDEAIASQNEGTDLPDQDISVLYRSEESGTSDNFQKFLGASTDIWETEGQQFPTEVGSGAQGSNGVASEASNIEGAITYVEAGFANQSGLGVANIDFGSGPVELNAESVGVALGALDFLTEGHNMVVDTDAMFAMNEAGAYPLILTTYEIVCSAGYDETTRDQVKDFLTVALDSQDDQLEALGYIPVTGEHYDRLVAAVEAIQ

SEQ ID NO: 309 - DNA, 1050 bp, Corynebacterium glutamicum
  CDS (101)..(1027): RXA02497
tcgatgccgccgctggcgaagactcggggaaacctaaaaataccgaagaagaatttgaccgattcacactttgccaccctagaccgtctaacctttaggtgtgagattaggtgtattagatgtgggcagcaatactgtccacctagttgcagtagacgcgcgtcccggtggacaccccaccccgatgagcaattggcgtaccccactgcgccttgttgagcttcttgatgactccggggcgatctccgaaaagggcatcaacaaactcacctcagcagtcggggaagcagcagacctagcgaaaacgctcggctgcgctgaactgatgccatttgctacatcggcagtccgctccgccaccaacagcgaggcagtgctcgaccacgtggagaaggaaaccggcgtccgcctgtccatcctttccggtgaagacgaagcacgccaaactttcctcgcagttcgacgttggtatggatggtccgcagggcgcataactaacctcgacatcggtggcggctccctggaactatcctccggaaccgacgaatccccagacctcgcgttctcactggatctgggtgcgggccgcttgacccacaactggttcgacaccgatccaccggcacgtaagaaaatcaacctcctgcgcgattatatcgatgcggaacttgcagaacccgcccgccagatgcgcaccctagggcccgcgcgcctggcagtgggaacatccaaaactttccgcaccctggcacgactgactggtgctgcgccctcatccgcaggaccacacgtcacccgaaccctcaccgcgccgggtctgcgccagctgatcgcatttatctcacgaatgactgcggcggaccgcgctgagctggaaggtatcagctcggatcggtcacatcagatcgtggcaggtgcgctagttgcggaagctgcgatgcgtgcgttggatattgacaaggtagaaatttgtccgtgggcacttcgtgaaggtgtgatcctcaccaggatcgacaaaggactcgagtaacatttacccggaaaggagtt

SEQ ID NO: 310 - protein, 309 aa, Corynebacterium glutamicum
VRLGVLDVGSNTVHLVAVDARPGGHPTPMSNWRTPLRLVELLDDSGAISEKGINKLTSAVGEAADLAKTLGCAELMPFATSAVRSATNSEAVLDHVEKETGVRLSILSGEDEARQTFLAVRRWYGWSAGRITNLDIGGGSLELSSGTDESPDLAFSLDLGAGRLTHNWFDTDPPARKKINLLRDYIDAELAEPARQMRTLGPARLAVGTSKTFRTLARLTGAAPSSAGPHVTRTLTAPGLRQLIAFISRMTAADRAELEGISSDRSHQIVAGALVAEAAMRALDIDKVEICPWALREGVILTRIDKGLE

SEQ ID NO: 311 - DNA, 1671 bp, Corynebacterium glutamicum
  CDS (101)..(1648): RXA01477
taatttgaattaagccctcttcaattttccgctttcgctgcgaggtgtgccaatgtggcgcattatttaatgcatactcggcgctattttgaggagcctcatgccacagttaagcagacgccagttcttgcagacaaccgccgttactgcaggtctagccacttttgcgggcacacctgcacgcgctgaagaacgccaattccagcatggcgtggcttccggggaccccaccgcaacctctgccattttgtggactcggctgaccccaattcccgacgccacacctggaagtggccttggccccgactctcctgtcacctgggaagtctcccccactcctgatttcgccagcatcacgcgctcgggaaccgtaatcacctccgcagcaagcgatcacaccgtccacgcgcacgccacgggtttgagcccatccacccgctatttctaccgcttcatctcctccaccggcgaggtctcccctgtggggcgcacgcaaacaacatcgcttgtcgacgctcccctcccgcaccttcgctttgcccttgcgtcgtgtgccaattgggaggcaggattttttgccgcctacggcgacatcgcccggcgcgctgacgccggcgaattggagatgttgatttttttgggtgattacatctacgagtacgccaccggtatgttcgccggaaaggacggtgtggtgcgcccgcatcagcctcttcatgaaaccatcacgttggagcactaccgcactcgttatggccattaccgcagtgacaatcacttgcaggcagcgcatgcggcgttgccgtggattgtcatgtgggatgaccatgagtcggccaacaactctaatcgtgagggcgcgcagaatcattccgctgatgagggttcgtgggtggatcgtcaaaatgctgctcggcaggtctttttggagtggatgccgatccgccaggaggacacgctctatcgttccttcacttttggtgacctcgccacgctgtcacttcttgatcttcgaagtttcagagatccagcaccctcccagcaacagtggctggagggtcaacgtgcggacaccatgatggggtcgcagcagtttgagtggctgaaatccaacgtggaacacaccaccacgacgtggaatatcatcggcagctcagtgatgtttgcccccatggcaattaccgggcagcctcttttccagatccctgaacctattcccgccaatttggatcagtgggacggctactcccgtgagcgcgaccgactcctagctgtacttgccgatttcgccactccaacgctttttctatctggcgatatccactccgaatgggcaaacgccatccggtttaatggtcgagaaatcggtgtcgaggcagtatgcagctccatcacctcagctaatgtcaacgacttcgccaaactccctgaggacaatccggtctccctgcaagcggaacaagtaatccgagccaacagttcgcatgtgcgccacgttgatcttgacgcccacggctacgccacggtgaatctcacccaagatggcgcgcacatggtctggcaccgcgtcgccgatctctcccttccggactcagaagttgctccggcaattgcacttgagtggaaaccaggcgtcggattcactacttgagctgctgatttgtaggtttt

SEQ ID NO: 312 - protein, 516 aa, Corynebacterium glutamicum
MPQLSRRQFLQTTAVTAGLATFAGTPARAEERQFQHGVASGDPTATSAILWTRLTPIPDATPGSGLGPDSPVTWEVSPTPDFASITRSGTVITSAASDHTVHAHATGLSPSTRYFYRFISSTGEVSPVGRTQTTSLVDAPLPHLRFALASCANWEAGFFAAYGDIARRADAGELEMLIFLGDYIYEYATGMFAGKDGVVRPHQPLHETITLEHYRTRYGHYRSDNHLQAAHAALPWIVMWDDHESANNSNREGAQNHSADEGSWVDRQNAARQVFLEWMPIRQEDTLYRSFTFGDLATLSLLDLRSFRDPAPSQQQWLEGQRADTMMGSQQFEWLKSNVEHTTTTWNIIGSSVMFAPMAITGQPLFQIPEPIPANLDQWDGYSRERDRLLAVLADFATPTLFLSGDIHSEWANAIRFNGREIGVEAVCSSITSANVNDFAKLPEDNPVSLQAEQVIRANSSHVRHVDLDAHGYATVNLTQDGAHMVWHRVADLSLPDSEVAPAIALEWKPGVGFTT

SEQ ID NO: 313 - DNA, 597 bp, Corynebacterium glutamicum
  CDS (101)..(574): RXA01509
ttccaaaattttcgaggatttccttgccccgggtctcgtttatttttgaacacgctagaattcaagggcagtaactaatttcaacccgggagaaatacctatgagcatcgaagtaaccgtcgaaatccctaagggatcacgcaacaagtacgaaatcgaccacgagaccggaaaggtctacctcgaccgctacctgttcactccaatggcatacccactggactacggctacatcgaccacaccctcggcgaagacggcgacccattggatgcactggtcatcctccccgagtccgtttttccagcagttgtggttaagtcccgaatcatcggtgttttcaagatgaccgacgaagccggcggcgacgacaagctgctctccgttctcgacgacccacgctacgaccacatccaggacatctccgacgtgtccgatttcctcaaggatgagatcgagcacttcttcgtccactacaaggacctggaaaagggcaagcacgttgacggttccggctggggcgacaaggctgaggctgaaaagatccacgctgaggcaatcgaccgctacaaggcataagtcttttgtaaattaagagc

SEQ ID NO: 314 - protein, 158 aa, Corynebacterium glutamicum
MSIEVTVEIPKGSRNKYEIDHETGKVYLDRYLFTPMAYPLDYGYIDHTLGEDGDPLDALVILPESVFPAVVVKSRIIGVFKMTDEAGGDDKLLSVLDDPRYDHIQDISDVSDFLKDEIEHFFVHYKDLEKGKHVDGSGWGDKAEAEKIHAEAIDRYKA

SEQ ID NO: 315 - DNA, 723 bp, Corynebacterium glutamicum
  CDS (101)..(700): RXA00100
  misc_feature (658): n=a,c,g, or t
gttttgcggtgttgaattgggtgtttaatgtgcagtgggcgtggggaatgctcattgcgtatccgcttgtttcacatgcggtgatcgcgcggagtaaacgatgattttggattgggttatctccatcatggaggcactcggcgccgttggcgtgggtgtcgcggtgtttttggagaacgttttcccgccgattccaagtgaggtggtgcttccgctcgcgggtttcaccaccacgcaaggcgatctcaatgtgtgggcggcgcttatgtggtcggtgatcgggtcggtttccggagcgtttttgctttacgggttggggcgctcaatcggggcggcacggttgcggcaggtcgccgactggatgtggcttgtcgacgcgaccgacgtggataaatccctatcgtggttcgaaaagtacgggaagtattcggtgtttttcggtcggttggtgccgggtgtccgaagtttgatttcgattccggcgggcgtcgacaagatgaatccggttctcttcggtgtgctcactgcggtgggcagcaccatttggaatgcggttctgatttggactggtgtgtggttgggggcggaatgggagacggtgtcgatgtggtttgagagctattcaacgatcatttacgtaggtatcgcgctcattgtngcttacgtgttgtttggtttagtccgtcgccgaattaaaacttaaccatcggttcgtagccgaag

SEQ ID NO: 316 - protein, 200 aa, Corynebacterium glutamicum
MILDWVISIMEALGAVGVGVAVFLENVFPPIPSEVVLPLAGFTTTQGDLNVWAALMWSVIGSVSGAFLLYGLGRSIGAARLRQVADWMWLVDATDVDKSLSWFEKYGKYSVFFGRLVPGVRSLISIPAGVDKMNPVLFGVLTAVGSTIWNAVLIWTGVWLGAEWETVSMWFESYSTIIYVGIALIVAYVLFGLVRRRIKT

SEQ ID NO: 317 - DNA, 705 bp, Corynebacterium glutamicum
  CDS (101)..(682): RXA00615
aaattgccaggattgatcattaatatcggctcattaaggctctttttaatgagagggattcccattgaatgatcagttggtgagttgggtggaaacactcatgacagcatcggtgttttatccggtgctgtcagttgtggtgctcatcgactgcattttgccgcttatccccagtgagactgttcttgctttggcaggggcgtggtcaggagctcggggaactccaaacttgtggttggttatttcagtagcaacgttggccgcgatcattggtgacaacctgtgttatttctttggcacgcggttgatcaatatggtgaacaggattccgggagaatcgaggcgcggaaaagcgctggagtgggcgcggaagaaccttaatgaacgggatgtttcgacaatcattatcgcccgctttattccgtgggctaggtggtttgtcaccatcattttgggatctgtgggatattcctggtcgaggtttatcgtgtgggattccattggagcgctaatttgggcaacccaggcaactttgttgggttatgtgggcggatggcttttccaagaacaaccgttgatcggcctggttgcaggcgcagctttgggaatcttcttcgggttctttttgcagtggctcaacaaaatgtgggagaggcgtcgtctggcgaaagtggctgcagaatgaaaatcaggccagacagtggg

SEQ ID NO: 318 - protein, 194 aa, Corynebacterium glutamicum
MTASVFYPVLSVVVLIDCILPLIPSETVLALAGAWSGARGTPNLWLVISVATLAAIIGDNLCYFFGTRLINMVNRIPGESRRGKALEWARKNLNERDVSTIIIARFIPWARWFVTIILGSVGYSWSRFIVWDSIGALIWATQATLLGYVGGWLFQEQPLIGLVAGAALGIFFGFFLQWLNKMWERRRLAKVAAE

SEQ ID NO: 319 - DNA, 870 bp, Corynebacterium glutamicum
  CDS (101)..(847): RXN00250
acaacaccagaccaccccaaccctgaataaacccctatttttctaaaaagtcacactttgccgtatagaaattcagtcaaccaagagtactctgtccaccatggtttttactcttgcggactccgtctcccaggttgcgctaggtccgtcctggctggaccctatggaacttctttccggctccggcccgttcggtagcttcattcttccggcgatgcttgccattgtctttatcgaatcaggcctacttttcccacttctaccaggtgattctctccttttcaccggtggtctcctagctaaccaggctgacccttttgcaccgctgtggctggtgctgatcctctgccctatcgccgcaattcttggcgatcaggtgggttactggattggccacaagttccaccctcgcctggtcaatcgtccggatggcaggattttcaagcaggaatacctcaagcagactgaggatttctttgagaagcatggccccgtgacgatcattttgtgccgtttcgtgcccatcgtccgtacttacgcacctctggtcgcaggtatggctggcatgcgttaccgcacgttcattatttacaacatgatcggtggcattttgtggggttccggcgtggtggctttgggtgctgcgttgggtcagttcgatttcgtccgcaacaatattgatctgattttcttgctgatcgtgttcatttcggtggttcctggtttggtcggcatggcccgcaagctggctgacggccacaagcaagccaacaccgagccacaagaaaaccccgcagtccagacagccccagtaaaaacccaggaagcccaggaagccccccagaactaatctttccggtccgccagttc

SEQ ID NO: 320 - protein, 249 aa, Corynebacterium glutamicum
MVFTLADSVSQVALGPSWLDPMELLSGSGPFGSFILPAMLAIVFIESGLLFPLLPGDSLLFTGGLLANQADPFAPLWLVLILCPIAAILGDQVGYWIGHKFHPRLVNRPDGRIFKQEYLKQTEDFFEKHGPVTIILCRFVPIVRTYAPLVAGMAGMRYRTFIIYNMIGGILWGSGVVALGAALGQFDFVRNNIDLIFLLIVFISVVPGLVGMARKLADGHKQANTEPQENPAVQTAPVKTQEAQEAPQN

SEQ ID NO: 321 - DNA, 525 bp, Corynebacterium glutamicum
  CDS (79)..(525): FRXA02010
cctgaataaacccctatttttctaaaaagtacactttgccgtatagaaattcagtcaaccaagagtactctgtccaccatggtttttactcttgcggactccgtctcccaggttgcgctaggtccgtcctggctggaccctatggaacttctttccggctccggcccgttcggtagcttcattcttccggcgatgcttgccattgtctttatcgaatcaggcctacttttcccacttctaccaggtgattctctccttttcaccggtggtctcctagctaaccaggctgacccttttgcaccgctgtggctggtgctgatcctctgccctatcgccgcaattcttggcgatcaggtgggttactggattggccacaagttccaccctcgcctggtcaatcgtccggatggcaggattttcaagcaggaatacctcaagcagactgaggatttctttgagaagcatggccccgtgacgatcattttgtgccgtttcgtgcccatcgtccgtacttacgcacctctg

SEQ ID NO: 322 - protein, 149 aa, Corynebacterium glutamicum
MVFTLADSVSQVALGPSWLDPMELLSGSGPFGSFILPAMLAIVFIESGLLFPLLPGDSLLFTGGLLANQADPFAPLWLVLILCPIAAILGDQVGYWIGHKFHPRLVNRPDGRIFKQEYLKQTEDFFEKHGPVTIILCRFVPIVRTYAPL

SEQ ID NO: 323 - DNA, 885 bp, Corynebacterium glutamicum
  CDS (101)..(862): RXA02120
ttggccacttgtttgagtaggctggcgggcaggtgcttgaaatactctgattagttccaagcaaattagcacaacttcacactttatttaggagcatgttatgtctgacctgaagtcacttgccacgaaatttgctagcgatcatgaatccggaaagctgctggtcctgcctaccgtctgggatacctggagcgcggggctcgtagaagaagcaggatttagtggcctgaccattggtagccacccagtcgcggatgcgacaggaagctccgatggtgaaaacatgaattttgcagattatatggcggtggtcaagaagatcacctcggcggtatccatccccgtaagcgttgatgtggaatccggttatggtctctcgcctgcggatttgatcgcacagattttggaagctggcgcagtgggcatcaatgtggaagatgttgtgcacagcgagggtaagcgtgttcgtgaggcgcaggagcacgctgattacatcgctgcggcacgtcaagctgccgatgtggcaggtgtagatgtggtgatcaacggtcgcacggatgccgtcaaacttggtgcagacgtttttgaagatccgatggtggaggccatcaagcgcatcaagctcatggaacaggcaggcgcgcgttcggtgtaccccgtgggtctgagcaccgccgagcaggttgagcgcctggtggacgctgtgtcagtgccggtcaacatcaccgcgcacccggttgatgggcacggcgcaggcgatctggccaccctcgcaggccttggcgtgcgccgcgtgaccttcggtccgctctggcaaaaatggctggctgccacctcggcgcagcagcttaagggctgggcttaaattgcttgtcgacgcctagt

SEQ ID NO: 324 - protein, 254 aa, Corynebacterium glutamicum
MSDLKSLATKFASDHESGKLLVLPTVWDTWSAGLVEEAGFSGLTIGSHPVADATGSSDGENMNFADYMAVVKKITSAVSIPVSVDVESGYGLSPADLIAQILEAGAVGINVEDVVHSEGKRVREAQEHADYIAAARQAADVAGVDVVINGRTDAVKLGADVFEDPMVEAIKRIKLMEQAGARSVYPVGLSTAEQVERLVDAVSVPVNITAHPVDGHGAGDLATLAGLGVRRVTFGPLWQKWLAATSAQQLKGWA

SEQ ID NO: 325 - DNA, 969 bp, Corynebacterium glutamicum
  CDS (101)..(946): RXS01000
ctttctatgcctacgcggatgtttccgtgatcattctggaaatcctcatcgtggtgattgtcattgaagtaatctccaacgcacttcgaaagaggctggtatgagcaccttaacctctcaccgcacagtaccggcccccagctctcccccggcgcgccccaacaaactggcgcgcaatatcgttgcaattgtcgctgcgctgattgtccttatagctaccggcacgctcaagatcgagtggaatgagcttccgcagatgcccgcgcaggtgtggcattacttagagctgatgtttagcgatcccgattggtcgaagtttggccgcgccgtccaggaaatgtggcgttccatcgccatggcgtggttgggtgccattttatgcgtggtggtctctgtccctctgggaatgttggctgcccgcggggtgggaccttattggctgcgtaccgttttacggttcgtgttcgcggtgattcgtgcgttccccgaagtggttatcgcaattattttgctaactgtcaccggcctaactccttttactggtgcgctcgcattgggtatctccggtattggacaacaggcaaagtggacctatgaagccattgagtccactcccaccggcccgtcagaggcagtgcgtgcagcgggtggaactacgccggaggttctgcggtgggcgttgtggccacaggttgcgccatccattgcatcttttgccctgtaccgctttgagatcaacatccgtacctctgcggtattgggcatcgttggtgcaggtggtatcggtagtatgcttgccaattacaccaactacaggcagtgggacaccgtgggcatgctgctcatcgtcgtggttgtcgcaacgatgatcgtcgatctcatctccggcaccatccgccgccgcatcatgaagggggctagtgaccgtgtcgtggcaccaagcaactgacgctccaccaagcatccgca

SEQ ID NO: 326 - protein, 282 aa, Corynebacterium glutamicum
MSTLTSHRTVPAPSSPPARPNKLARNIVAIVAALIVLIATGTLKIEWNELPQMPAQVWHYLELMFSDPDWSKFGRAVQEMWRSIAMAWLGAILCVVVSVPLGMLAARGVGPYWLRTVLRFVFAVIRAFPEVVIAIILLTVTGLTPFTGALALGISGIGQQAKWTYEAIESTPTGPSEAVRAAGGTTPEVLRWALWPQVAPSIASFALYRFEINIRTSAVLGIVGAGGIGSMLANYTNYRQWDTVGMLLIVVVVATMIVDLISGTIRRRIMKGASDRVVAPSN

SEQ ID NO: 327 - DNA, 927 bp, Corynebacterium glutamicum
  CDS (101)..(904): RXS01002
gactgctgataccgcacaggatgaaatcactcgttacggcgagatcctgaagaagttctccaactaatttccctgtttccaatactcaaggtgtgcgcatatgaattctgatgcttcggctaccaccaactcctgggctatcaacttcgaccatgtgtcggtgacgtatcccaatgggacgaaagccctcgatgatgtttccctcaccatcaatcccggtgagatggttgccatcgtgggtctgtcaggatcgggtaaatccacgctgattcgcacgatcaacggtcttgtccgcgctacggaaggcaccgtgacggtggggccgcatcagatcaacaccttgaaggggaaagcactgcgtgatgcccgtgggcagatcggcatgattttccaggggttcaacctgtcggaacgcagcagtgtgttccagaatgttttggtgggccgcttcgcgcacacagcgtggtggcgtaacctcctcgggtttcccacggagcacgacaagcagattgcttttcacgcgttggagtccgtgggcattttgcacaaagtgtggacccgagctggtgctttgtcgggtggacagaaacagcgcgttgctattgcgcgcgccttatcgcaagatccgtctgtcatgctggcagatgagcctgtggcaagccttgatccgccaaccgcgcattccgtgatgcgcgatctagaaaacatcaacaacgtggaaggcctcaccgtgttggtgaacttgcacttgattgatttggctcgtcaatacaccacaaggcttgtgggtttgcgtgccggcaagctggtctatgacggtcctatctctgaggccaccgataaagactttgaagctatctatggtcgccccatccaggctaaagacctgctaggtgatcgcgcatgaccacgccttcttctacactt

SEQ ID NO: 328 - protein, 268 aa, Corynebacterium glutamicum
MNSDASATTNSWAINFDHVSVTYPNGTKALDDVSLTINPGEMVAIVGLSGSGKSTLIRTINGLVRATEGTVTVGPHQINTLKGKALRDARGQIGMIFQGFNLSERSSVFQNVLVGRFAHTAWWRNLLGFPTEHDKQIAFHALESVGILHKVWTRAGALSGGQKQRVAIARALSQDPSVMLADEPVASLDPPTAHSVMRDLENINNVEGLTVLVNLHLIDLARQYTTRLVGLRAGKLVYDGPISEATDKDFEAIYGRPIQAKDLLGDRA

SEQ ID NO: 329 - DNA, 927 bp, Corynebacterium glutamicum
  CDS (101)..(904): RXS01003
agctggtctatgacggtcctatctctgaggccaccgataaagactttgaagctatctatggtcgccccatccaggctaaagacctgctaggtgatcgcgcatgaccacgccttcttctacacttatcccacaaaagcctcgggctggggtaaagacctatctcatcatcggcgccatcgttgtcttcaccgtggcaacagcaaccccagcgctaggtggcattgagcttgatttcgcttccattgctgcgaattggcgcaatggtgccaacaaactcctgcaaatgctgcagcccaactttgcgttcttgcctcgtacgtggcttcccatgttggaaaccctgcagatggcgcttgttggagctgtcttgtctgctgccgtatcggtgcctttgacgttgtgggcagcgcaggcaaccaacaccagtgcgattggtcgtggcattgtccgcaccatcattaacgtggtgcgctctgtccccgacttggtgtatgccaccatcttggtcgccatggttggtgtcggcgcattacctggcattttgacgctgtttctgttcaacctgggcatcgtggtcaagcttgtctctgaggccattgattccactgagcatccctatatggaagcaggacgcgcagcaggtggatcacagttccaaatcaaccgagtctccgcgcttcctgaagtcatgccgctctttgccaaccaatggctctacaccctagagctgaatgtacgcatctccgccatccttggcatcgtgggcgcaggtggcatcggcaggctgcttgatgaacgccgagctttctatgcctacgcggatgtttccgtgatcattctggaaatcctcatcgtggtgattgtcattgaagtaatctccaacgcacttcgaaagaggctggtatgagcaccttaacctctcaccgc

SEQ ID NO: 330 - protein, 268 aa, Corynebacterium glutamicum
MTTPSSTLIPQKPRAGVKTYLIIGAIVVFTVATATPALGGIELDFASIAANWRNGANKLLQMLQPNFAFLPRTWLPMLETLQMALVGAVLSAAVSVPLTLWAAQATNTSAIGRGIVRTIINVVRSVPDLVYATILVAMVGVGALPGILTLFLFNLGIVVKLVSEAIDSTEHPYMEAGRAAGGSQFQINRVSALPEVMPLFANQWLYTLELNVRISAILGIVGAGGIGRLLDERRAFYAYADVSVIILEILIVVIVIEVISNALRKRLV

SEQ ID NO: 331 - DNA, 1182 bp, Corynebacterium glutamicum
  CDS (101)..(1159): RXS01902
ggctggtccgaagtgcaaaccttcaacaccggcacctacggtgacaactggaacttcctcttcttcggcgacacccagctgtacaacacccactccaaccgtgcagaagaagtccagaactgggcaaacaacctggaacggcggcccaccaatcgaaaacccaggaacctccttcatcctctccgcgggtgatcaggcaaaccactccagctgggacgagcactccgcatacatctccccagaaaccctgcgcaactaccgtctggccgtgaacaatggaaaccacgaccagtacaactacgacgcctacaacgcgatgtacccacgccctaaccaggtcgatgagaactacttcttcgagtacaacaatgcactcttcctgtccctggactccaacgactacttggacatcgacgacgacatcgcattccttcgcgacaccgtcgcagcacacggtgacgacaaggactggatcgtcctgacctaccaccattccactttctcccaggcctaccacatggatgacgctcgcattaagtaccagcgcgaacgcctcaccccagtgatctctgaactgaacgttgacttggttctcggtggacacgaccacatctacacccgctcccacctgatgaacggcttcaccccagtcgatgcaggccgcgaagcagttgtcggtgaaactctgaaccctaaggccggcgaagttgtttaccttgcaaccaactcttcctcaggctccaagttctacgacttctacgacttccagctcggccagcgttacgacaccggactggatttccaggaaaccgtcgatcagaagaagatccgcacctacaccgcagtctggaaccaggaccaggttcaggactacaccaacgttgaactgaccccagaaggcctgactgtgaccactaaggacgcagtctccggcgagctggttgaccagttcaccctgagcaagcaggaccgcgacgaagaatctgaagtcccagttgaagatgacaaggacggagacaacgcgaccggctcctccaaccttggtctagctgctatcttggctccagttctggccatcttcggtttcgtcggtggactctttgttggcggcggctccctcgctgagttctttgccaacctcggcgtgaagatgcctttctaatactgtctgagattcaagca

SEQ ID NO: 332 - protein, 353 aa, Corynebacterium glutamicum
VQKKSRTGQTTWNGGPPIENPGTSFILSAGDQANHSSWDEHSAYISPETLRNYRLAVNNGNHDQYNYDAYNAMYPRPNQVDENYFFEYNNALFLSLDSNDYLDIDDDIAFLRDTVAAHGDDKDWIVLTYHHSTFSQAYHMDDARIKYQRERLTPVISELNVDLVLGGHDHIYTRSHLMNGFTPVDAGREAVVGETLNPKAGEVVYLATNSSSGSKFYDFYDFQLGQRYDTGLDFQETVDQKKIRTYTAVWNQDQVQDYTNVELTPEGLTVTTKDAVSGELVDQFTLSKQDRDEESEVPVEDDKDGDNATGSSNLGLAAILAPVLAIFGFVGGLFVGGGSLAEFFANLGVKMPF

SEQ ID NO: 333 - DNA, 1266 bp, Corynebacterium glutamicum
  CDS (101)..(1243): RXA01967
gatgccaccgttgaggcagacaaaaacgtgggtggaccgcaatgggtccgctcatgtggagttgtcgccaaccgtgccaccgcaaacccccaaacgtcacatgcgcatccaaagccccatggaaatttcctggagtgaagcggtgcgcgaaggcggggagcattccgctcgccgctgtggtgacatggctgtgtccgcgttggctaagccgaatcccatcattgacgatgatccggaaggcaaccccgatgtttgcatgtatacctggatcgttgagtgtcccggcgctaccgcagtgctgctatggatcaatggggtttttgatcacgagcgcattgaagaatctgaaatgacccgcctcgagggctctgatctgtggattctcagcttgcgtatgccttccgattggcgagccagctacaccgtcaacgcctggtctggcgacggggttgcgccatggcgtgaggcgggcgatcggatgcatatccgcaaagccgcgatgtcgggtgggcgtccggattcccgcgcgatgggtcatatcatggattcctcgctcgttgaaggccctgatgcgttgccggactgctgggttgcggcgtcgacaagcgtaaaagtcgtggaagaaaccgtcgccggcgagcatttctggttctatgaggcgccggtcaaggcgccgctgctggtgctgtttgatggccaacactggaacaacagcatgaatctgcctgcgcaggtcgatgcggccatcgccatcggcttgctgccgccggtcagcctgctcatgatcgattccgtcaacaccgaacgccgctgggatagtgtcggcgtgccaggtgggcaggttgatgtgcttatcgacgccctcctcccgcacgtccgcgaaacctacaacgtttccgcgcgcggcgaagacaccattgtcaccggtgcaagcttcggcggcctggcgtccctgtgggctcttgcgctttccgacggcgaagtcggccacgcaatcgcgcaatcgccaagcctgtggcgcttcaacgttgccgacgcgctttctgcagcagagcagtggagctcaatccacctgcaagctggaaaatacgaaggtgaaatgctgcgcctgtcgcatcagctcgccgaagatctctccggcgacatccgcgaggttcgtgtgcgcggcgtgcatggcggccacgattgggcctggtggcgggtgcatatgctcaccgaactcaccaggctgcttaaaaccctctaatcaaagtagggtgcaaaacg

SEQ ID NO: 334 - protein, 381 aa, Corynebacterium glutamicum
MRIQSPMEISWSEAVREGGEHSARRCGDMAVSALAKPNPIIDDDPEGNPDVCMYTWIVECPGATAVLLWINGVFDHERIEESEMTRLEGSDLWILSLRMPSDWRASYTVNAWSGDGVAPWREAGDRMHIRKAAMSGGRPDSRAMGHIMDSSLVEGPDALPDCWVAASTSVKVVEETVAGEHFWFYEAPVKAPLLVLFDGQHWNNSMNLPAQVDAAIAIGLLPPVSLLMIDSVNTERRWDSVGVPGGQVDVLIDALLPHVRETYNVSARGEDTIVTGASFGGLASLWALALSDGEVGHAIAQSPSLWRFNVADALSAAEQWSSIHLQAGKYEGEMLRLSHQLAEDLSGDIREVRVRGVHGGHDWAWWRVHMLTELTRLLKTL

SEQ ID NO: 335 - DNA, 555 bp, Corynebacterium glutamicum
  CDS (101)..(532): RXA00070
ccactcgtcctcgacatacttctcctggcactaaacgcaggggttgacacatctgggtagactatcgaagtacattttgtgtcattgaggaggatcaacggtgggtatcaatcgcatcagccaaggctctgccccgaagctgggagtgcgaagcaccagacagcgaaaagccgtaattgacgttcttgaggaaatcgataacttcgcttccgccaaagaaatccatcacgagctatccaccagggaacacaacgtcggcctcacaaccgtctaccgaaccctccaatccctcgccgacatcggagcagtcgacgtacttaccgtcacgggtggagaaactctgtaccgccaatgccacgacgagggacaccaccatcacctggtctgcaccaattgcggtcgcacagtcgaaatcgatggcggtccagtagagacatgggcacaggaaattgccactaaaaacggctttgctctcagtagtcacgaggctgaaatctttggactttgcgctgattgtaaggaaaaagttacgtagttcaaggacatatgaagctg

SEQ ID NO: 336 - protein, 144 aa, Corynebacterium glutamicum
VGINRISQGSAPKLGVRSTRQRKAVIDVLEEIDNFASAKEIHHELSTREHNVGLTTVYRTLQSLADIGAVDVLTVTGGETLYRQCHDEGHHHHLVCTNCGRTVEIDGGPVETWAQEIATKNGFALSSHEAEIFGLCADCKEKVT

SEQ ID NO: 337 - DNA, 681 bp, Corynebacterium glutamicum
  CDS (101)..(658): RXA01934
ttattgatgatcgcgtgcgtaacattgaggcagcgcgcgaagaaggtctcagcacaattcacttcactggcttagattccttaaaagaaagcattcaggaatgacacctcaaccactgattttgcctttcggcgataaagttccgcggatccatgaaagcgcatggattgccccgaatgccacgattatcggggatgtcgagattggcccggatgcgtccattttttatggcgttgtcctgcgcggtgacgtcaacaaaatcaccatcggcgcccgcaccaacgtccaggacaattgtgttctccacgtcgatggcgatgcgccgtgcaccctcggcgacgatgtcacggtcggccacatggcgcttgttcacggcgcgacggtgggcaacggcacgcttgtcggcatgaaatctgcgctgctttccggcagccacgtcggcgccggcgcactcattgccgctggtgcggtggtgctggagggccatgaaatcccggcgaaagctttagcggccggggttccggccaaagtgcgcagattgcttgacgacgcccagtcccagtcatttatcccccacgcgggccgctatgtagaaacatcaaaagcccaggcttccatcgcggaagcactgagcttagatgaggttagggtacgagagtaagtggctcgttgagtagtcga

SEQ ID NO: 338 - protein, 186 aa, Corynebacterium glutamicum
MTPQPLILPFGDKVPRIHESAWIAPNATIIGDVEIGPDASIFYGVVLRGDVNKITIGARTNVQDNCVLHVDGDAPCTLGDDVTVGHMALVHGATVGNGTLVGMKSALLSGSHVGAGALIAAGAVVLEGHEIPAKALAAGVPAKVRRLLDDAQSQSFIPHAGRYVETSKAQASIAEALSLDEVRVRE

SEQ ID NO: 339 - DNA, 609 bp, Corynebacterium glutamicum
  CDS (101)..(586): RXN01997
aaaaaggtgggaaacttagccaatccaaagcccaaaaatgcgggttatgctgcgctaacctatgctgacagccttgcggaagttgtgtacgttaggggccatgacaatcaacgagaagatcgcatcagctttcaacaaccaagtgactgcagagcttgaagcttcaatggtgtaccttcagctctcctacgttctagacgatctgggcctcaccggcatgcgcgactggatgaaggcacagagcaaagaagagctcgaacacgcacagaagttcgctcagcaccttcttgaccgtgactacaccccacagatcggtgacattgcaccaccaaagcttgatgtcacctccgctatcgaggctttcgaggcttccctggcacacgagcagaagatctccggcctgatccgcgagctcgctgccatccaggacgctgagaaggactacgattcccgcgcactgatcgactggttcctcaacgagcagatcgaagaagaagcaaccgtcggcgagatcatcgaccgcctccgtatcgctggtgattccggttccggaatcctgcgcatcgacggcgaactcggctcccgctaaattccccgcagtttttaatg

SEQ ID NO: 340 - protein, 162 aa, Corynebacterium glutamicum
MTINEKIASAFNNQVTAELEASMVYLQLSYVLDDLGLTGMRDWMKAQSKEELEHAQKFAQHLLDRDYTPQIGDIAPPKLDVTSAIEAFEASLAHEQKISGLIRELAAIQDAEKDYDSRALIDWFLNEQIEEEATVGEIIDRLRIAGDSGSGILRIDGELGSR

SEQ ID NO: 341 - DNA, 490 bp, Corynebacterium glutamicum
  CDS (101)..(490): FRXA01997
aaaaaggtgggaaacttagccaatccaaagcccaaaaatgcgggttatgctgcgctaacctatgctgacagccttgcggaagttgtgtacgttaggggccatgacaatcaacgagaagatcgcatcagctttcaacaaccaagtgactgcagagcttgaagcttcaatggtgtaccttcagctctcctacgttctagacgatctgggcctcaccggcatgcgcgactggatgaaggcacagagcaaagaagagctcgaacacgcacagaagttcgctcagcaccttcttgaccgtgactacaccccacagatcggtgacattgcaccaccaaagcttgatgtcacctccgctatcgaggctttcgaggcttccctggcacacgagcagaagatctccggcctgatccgcgagctcgctgccatccaggacgctgagaaggactacgattcccgcgcactgatcgactggttcctcaacgagcagatcgaa

SEQ ID NO: 342 - protein, 130 aa, Corynebacterium glutamicum
MTINEKIASAFNNQVTAELEASMVYLQLSYVLDDLGLTGMRDWMKAQSKEELEHAQKFAQHLLDRDYTPQIGDIAPPKLDVTSAIEAFEASLAHEQKISGLIRELAAIQDAEKDYDSRALIDWFLNEQIE

SEQ ID NO: 343 - DNA, 783 bp, Corynebacterium glutamicum
  CDS (101)..(760): RXA01082
ggccttgcttgcgttagttgcagtgcttcctgaatatgcttctgaaacggttgtcgagcacacttatcaaacatcggcggcgaattaagaaggtgaacagttgacgcagtggggtaattcgaatgttgtggaggactatctcacagcacttttccgtgcagaagaatgggatgaggaaccaacaacaggaaaactcgctgaagtaattggagttaccgcatcaacggtgtcggcgacgctcaaaaaactcaaccctgagggcttcgtcaattaccgtccctacggggacatcgagctgacgcccgcaggtcgagacatcgccatcaacgtgatcaggcggcgccggatcattgagacctatctgtctgagaagcttggattaggcgctcatgaactacacggcgaggcagatttattagagcacgcagtgtctccactggtgttggagaagatgtttcaggcagtgggctatccaacgttggatcctcacggggatcccatccccaccgaatctggggagatgaccatcaatgatggactcatgcttttgggactaaaagctggcgcatctgccacggttacacgtgttagggacggaaacccatcagtggttcggtacctcactggagtgggaattaccgtgggcacaacggtcacggtcgttgaagctcttagcgatattgccacactgcgcctgcagatcggggaaatgtttcaagacattccccttgcagtggcaaacgcagtgcgcgtatcacgttagttcagcgtgcccagcgcgct

SEQ ID NO: 344 - protein, 220 aa, Corynebacterium glutamicum
LTQWGNSNVVEDYLTALFRAEEWDEEPTTGKLAEVIGVTASTVSATLKKLNPEGFVNYRPYGDIELTPAGRDIAINVIRRRRIIETYLSEKLGLGAHELHGEADLLEHAVSPLVLEKMFQAVGYPTLDPHGDPIPTESGEMTINDGLMLLGLKAGASATVTRVRDGNPSVVRYLTGVGITVGTTVTVVEALSDIATLRLQIGEMFQDIPLAVANAVRVSR

SEQ ID NO: 345 - DNA, 1068 bp, Corynebacterium glutamicum
  CDS (101)..(1045): RXA01236
tttccaccagttaagatgttgtgagacaaatccaaacatagaagggctgtgcattctcatggtttcaaccacaacatctcgctcaatcgctggactgtcagtgcttgtggcaacagcactaatcgctggctgtagttccgcagaggatgggacggttgactcggggagcagcacagaggtcaccacaacccaaagcaaggaaggttttcctgtcaccgtcacgtttgccccagaagcacctgtgaccattgaggatcaaccagagcgcatcgtcagtttgtccccagcgattacagaaaccttgttcgctgtcggggcaggggatcatgtcgtcgcagtggatgaatactcaaactacccagaggacgcaccgctggtgcagggtctgtctggttttactcccaatgtggagtccatcttggattacgatcctgacctggtcgtgttgatgtctgcagatgattccattttgaccggcctggatgctgcaggagtggatactttagtgatccccgcagcagagaacttggatgagacctactcccagattgaacaagtaggtcgagccaccggatttgaagatcaagcaacaacggttgttgatcagatgaaaaccgccattgatgctgcagttgccacagttcctgaagaggtaaaagagcagggcttaacctacttccacgagctgggcagtgatttgttcactgtgtcagagcaaacctacatcggtcagatttacgacatgtttggtctcacctctattgctgacggtggcgacgcttactcgcagctatccaacgaagcaatcattgcggcaaaccctgatctgattttcctcagcgatgccaaggccgaaaacctcactgcagaagatattgcggcgcgtccaggctgggacaccattgatgcagtagccaatggacgtatctacattttggacgatgatattgcttccaggtggggacctcgcgtatcccagctggtggaagaaatcgcagcgcagttgaatcagcttgcttcttctgaagctgtgccggccgctgcttaagttttcgtgctgaagagaat

SEQ ID NO: 346 - protein, 315 aa, Corynebacterium glutamicum
VLVATALIAGCSSAEDGTVDSGSSTEVTTTQSKEGFPVTVTFAPEAPVTIEDQPERIVSLSPAITETLFAVGAGDHVVAVDEYSNYPEDAPLVQGLSGFTPNVESILDYDPDLVVLMSADDSILTGLDAAGVDTLVIPAAENLDETYSQIEQVGRATGFEDQATTVVDQMKTAIDAAVATVPEEVKEQGLTYFHELGSDLFTVSEQTYIGQIYDMFGLTSIADGGDAYSQLSNEAIIAANPDLIFLSDAKAENLTAEDIAARPGWDTIDAVANGRIYILDDDIASRWGPRVSQLVEEIAAQLNQLASSEAVPAAA

SEQ ID NO: 347 - DNA, 1059 bp, Corynebacterium glutamicum
  CDS (101)..(1036): RXA01354
tcggcgccatgcgccttccaaaaaggcattgcttttcgacgtccccctacgcttcgattttgcaaaattatttaggcaaggctaccttttgcctatgcatatgaagattagccggcgcgcattcctcggcacactgctcggcgccaccacccttgctgtaactgcctgcgcgcaatcctctcaaaaccaaaactcctccgcttcctcatcttcttcatcctcagcggaatcaagcacctcttcatcctcctccgatgaacagcgcatcgtcgccctcaacaccggtcagttggacaacctcctccttctcggcatcaccccagtgggcgtcgccgctgcaaaaaactctgacctgatcccacagttcctcaaggatcgcttcggtgcagacatggacttggacagcatcgccgactgcggtctccgccaatctccagacatcgaagccatcgcgaacctcaaccccaccctgatctgcgcaaactcccgcgccgacgaagaggtcctcaacaaactccgcacgatcgcccccgtggtcaccggcgaaggtggcggtgaaaactggaagcaagacctcctcaccatcgcagaggcagcaggccagaaggaaaaggctgaaaccctcctgaaatcatacgaggactcagcagccgaaatcgccgcaaaccagcctgcgaacccaccaaccgtttccttcctgcgcaccaaagatcaggaattccagatgtacggcgcacaatccatggccggaacggttgctgccgattgcggttacgcccgcccagaaaaccagcagttcaccgacacggcaggtcaagacctctccgctgagctcattgcccaagctgatgccgactggcttttctacggcatcaaagaaggcaacatcaaccctgaagacaccccattgtggacttcactcaaagcggttcagtccaaccaagcaatcccagttgacggcgattcctggtacctcaacgcatccctcgtgtcggctgaaatcatcctccaaggcctcaaagacaacgtcaccgtctaagccgatttaagggcctcaaa

SEQ ID NO: 348 - protein, 312 aa, Corynebacterium glutamicum
MKISRRAFLGTLLGATTLAVTACAQSSQNQNSSASSSSSSSAESSTSSSSSDEQRIVALNTGQLDNLLLLGITPVGVAAAKNSDLIPQFLKDRFGADMDLDSIADCGLRQSPDIEAIANLNPTLICANSRADEEVLNKLRTIAPVVTGEGGGENWKQDLLTIAEAAGQKEKAETLLKSYEDSAAEIAANQPANPPTVSFLRTKDQEFQMYGAQSMAGTVAADCGYARPENQQFTDTAGQDLSAELIAQADADWLFYGIKEGNINPEDTPLWTSLKAVQSNQAIPVDGDSWYLNASLVSAEIILQGLKDNVTV

SEQ ID NO: 349 - DNA, 1071 bp, Corynebacterium glutamicum
  CDS (101)..(1048): RXA01620
cggccgagcagtaaacttgcaggtcaatgcaactttttaaccgtagaaagttatggccaaagactggcaataggttaagaacttgcgttaggatagcctaatgcaatctattcgaacgaccttcaggtcgctttcacgcagcgcagttatcgtgggtaccgttttggctttgggtatcgcaggatgttccacggccagtgatgaagccacaagcaccagcgacgatgtagctgtcggcggccgcctattttctacagcggattccgccaccgccgctctgggaagcgacgccgaaccaggccaattcccccgcaccgttgtgcattcacgcggcgaaactacccttgagcagcagccacaacgagtcgtggttctcgacagcggtgaaatcgaccaggttttgagcctcggcgtgactcccgtcggcatcgccagcccgaaagacgcctccagccagcccgcttacctcgaaaatcagctggcagatgtacaaactgtgggcaccacgagtgagctcaatttcgaagccatcgccgccctcaagcctgacctgattctgggcagcaagctgcgcgtcgacgaatcctacgatcagctctcccaaatcgcaccaaccgtgctgagtattcgccccggattcccctggaaggaaaacttcctcctcaccgccgacgcgctcggtctcgagggcaaagccgtcgaggttctcaacgagtaccaaacccatgtcgatgcagtccgcgagaccatcgacggcagcccagaaatctcactcgtccgcttcatgcctggtcgcacccgcctgtacggaaacctctctttcatcggtgcaatccttaaggacctggggctttctcgcccagagatccaaaatatcgacgatcttgccgtggagatctcccccgaaaacatcaccgatgccaacggcgactggattttctactccacctacggcaagcccgaggccaccgagcaggacaacattttgtccaacgagctgtggcacaaccttccccgccgtccaagaaggtcatgccctggaggtcaatgacgagagctggttcatggggt

SEQ ID NO: 350 - protein, 316 aa, Corynebacterium glutamicum
MQSIRTTFRSLSRSAVIVGTVLALGIAGCSTASDEATSTSDDVAVGGRLFSTADSATAALGSDAEPGQFPRTVVHSRGETTLEQQPQRVVVLDSGEIDQVLSLGVTPVGIASPKDASSQPAYLENQLADVQTVGTTSELNFEAIAALKPDLILGSKLRVDESYDQLSQIAPTVLSIRPGFPWKENFLLTADALGLEGKAVEVLNEYQTHVDAVRETIDGSPEISLVRFMPGRTRLYGNLSFIGAILKDLGLSRPEIQNIDDLAVEISPENITDANGDWIFYSTYGKPEATEQDNILSNELWHNLPRRPRRSCPGGQ

SEQ ID NO: 351 - DNA, 915 bp, Corynebacterium glutamicum
  CDS (101)..(892): RXA02052
cctcggcgtcgcactccttctaagctcctgttcttcaacatcttccgatgaatcaatccaacctgaagttgccagcactggatattcagtggagcacgcaatgggcaccaccgaaatccctgaaaccccaacgcgtgtggtcgtcattgattccccacacctcgacgcacttttggctttgggaattactccagtcggagctacggaatctggatccgaaaatggtttccccgcctacttggctgacgagctaaaagacaccgaatctgttgggctgacatctgagccaaatttggaaaagatcgccgcactggatccggatttgatcattggcgcaaaggtccgccacgaggctatttatgatcagctttcagacatcgcaccaaccgtgatgtccgaaggttccggcacaaactggaatgaacaggcagaaatcactgcggcagcagtaaacaagtctgatgagatggacaaactgatctcagacttggacacccgtgccacagagcttggtgaagagatcggtgctgacggacaaaccgcttcaatggttcgattccgcacggacaacttcaggctctatggtcccgagaccttctctggttcagttctggaacaagttggatttgacctgggggaacgtgattggaatgagtactccatgatggagctatcctcagaaaactttgggcagatcgatggagaccttattttctacaccatcccaggatcccctgaagcaaccacttatccaaagatttccgaactgtgggttgattcaccagcagttcggcaaggtagaacttacgagtttgaagacgaaacctggatggtcggcatcggtgtattaggtgccaatgaaatcttggatgacctggaagaaactctgagctagtttcctttaggccaagcaac

SEQ ID NO: 352 - protein, 264 aa, Corynebacterium glutamicum
MGTTEIPETPTRVVVIDSPHLDALLALGITPVGATESGSENGFPAYLADELKDTESVGLTSEPNLEKIAALDPDLIIGAKVRHEAIYDQLSDIAPTVMSEGSGTNWNEQAEITAAAVNKSDEMDKLISDLDTRATELGEEIGADGQTASMVRFRTDNFRLYGPETFSGSVLEQVGFDLGERDWNEYSMMELSSENFGQIDGDLIFYTIPGSPEATTYPKISELWVDSPAVRQGRTYEFEDETWMVGIGVLGANEILDDLEETLS

SEQ ID NO: 353 - DNA, 1200 bp, Corynebacterium glutamicum
  CDS (101)..(1177): RXA00372
gcagacatttccataagtcctgcgaaatgcgcccattcatgtaaagatgttatttcctcccccaaacactccttaaaatttcaagaagggccttattttcatgtcttcgaagcaccctttgaagcgcactgccgttactgtttttgcactcggcgcttccgctgctctcctcgtggcttgctctgaaccttctgaggacgtttccaccgcagagaccaccactgcaagctcttccgctaacgcatccgatgcagccggtgaaaaagtaaccatcaccgtctacacctctgagcctgaggaaaaggtcgatgagatcaacaaggcgttcatggaagccaacccagatattgaggttgaggtgtaccgcgctggtactggcgatctgactgctcgcattgaagctgaaaaggcatccggttctatcgaggctgatgtgttgtgggctgcggatgctgcaacctttgaaacttatgcagcacagggcgaccttgcagagctggaagatgttgagacttccgacatcattgaagaggctctggatgctgagaacttttatgtaggcacccgcatcatcccaaccgtgattgcatacaacactgaagttgttgatcaggctgagcttcctacgtcttgggctgatctgactgatcctaagtatgcaggccaactggtcatgccggatccagctgtgtctggtgctgcagccttcaatgcttctgtgtggaagaacgaccctgcgcttggcgaagcctggatcaccgccttgggtgaaaaccaaccaatgatcgctcagtccaacggcccaacctcccaggagatcgctggcggtggccacccagtgggcatcgtggtggactacttggtgcgcgacttggctgctgctggatctccaatcgacaccatctacgcatcggagggttctccttacatcactgagcctgcaggtgtgttcgctgattctgaaaagaaggaagcagccgagcgctacatcaacttcctgctgtctgttgaaggccaggaaatcgcagttgagcaggcatacctgccagtgcgtgaagatgtcggaactccagagggcacccccgagttggctgacatcgagctcatgacccctgacctggaggttgtaaccgctgataaggcggctgctgttgagttcttccaaaacgcaatgaactagttttcctatgcagttatctc

SEQ ID NO: 354 - protein, 359 aa, Corynebacterium glutamicum
MSSKHPLKRTAVTVFALGASAALLVACSEPSEDVSTAETTTASSSANASDAAGEKVTITVYTSEPEEKVDEINKAFMEANPDIEVEVYRAGTGDLTARIEAEKASGSIEADVLWAADAATFETYAAQGDLAELEDVETSDIIEEALDAENFYVGTRIIPTVIAYNTEVVDQAELPTSWADLTDPKYAGQLVMPDPAVSGAAAFNASVWKNDPALGEAWITALGENQPMIAQSNGPTSQEIAGGGHPVGIVVDYLVRDLAAAGSPIDTIYASEGSPYITEPAGVFADSEKKEAAERYINFLLSVEGQEIAVEQAYLPVREDVGTPEGTPELADIELMTPDLEVVTADKAAAVEFFQNAMN

SEQ ID NO: 355 - DNA, 1137 bp, Corynebacterium glutamicum
  CDS (101)..(1114): RXA00088
gctgtgttactttcatctttaggtaacctaccctcactaaagctctgggaatactctggcagttttggtggattatttttatagactttcaaaggacgacatggtgaaaaaccgattcaagctagtttcaatcgcaactgttgcggccctggcgctcgttggctgctcttccaccgacagcacctcttccgagtcttcttccgctgcagagtcaaccgctgcagctagcaccctgactatcgaagacaaccacggcaccgaagggatctccctgccaatcgagggcgtcgctgcgaccgacaaccgcgcattcgaactgcttgatcgctggggtgtagagctcgttgcagctccacttcagctggttccatttaccgttacgggctacaccgaagagggcggcgtcgctaaccttggctcccaccgcgagccagacctggaagcacttgctgctgcacagccttccctgatcatcaacggccagcgcttcgctcagtactacgatgacatcattgccctgaaccctgacgcaaccgttgttgagctagacccacgcgatggcgagccacttgaccaggagcttatccgccaggctgaaaccctcggtgagatcttcggcgaagaagaagatgctgcaaagatcgttgctgatttcgagtccgcacttgagcgcgctaagaccgcatacgcagcaatctccgaccagaccgtcatggcagttaacgtttccggcggaaacattggctacatcgctccttccgttggacgcacctacggtccaatcttcgacctggttggactcaccccagcactcgaggttggcaacgcgtcctccgaccacgagggcgacgacattaacgtcgaagcaatcgcagctgcaaacccagacctgatcctggtcatggaccgcgatggtggcaccagcacccgcaacgaagctgattacgttccagcagagcagatcgtctccgacaatgaagcactggcaaacgtcaaggctgtcaccgacggatacgtttactacgcacctgcagatacctacaccaacgaaaacatcatcacctacaccgagatcctcaacggcatggcagatatgttcgagaaggcagctcagtaggggatcgatcccacactgac

SEQ ID NO: 356 - protein, 338 aa, Corynebacterium glutamicum
MVKNRFKLVSIATVAALALVGCSSTDSTSSESSSAAESTAAASTLTIEDNHGTEGISLPIEGVAATDNRAFELLDRWGVELVAAPLQLVPFTVTGYTEEGGVANLGSHREPDLEALAAAQPSLIINGQRFAQYYDDIIALNPDATVVELDPRDGEPLDQELIRQAETLGEIFGEEEDAAKIVADFESALERAKTAYAAISDQTVMAVNVSGGNIGYIAPSVGRTYGPIFDLVGLTPALEVGNASSDHEGDDINVEAIAAANPDLILVMDRDGGTSTRNEADYVPAEQIVSDNEALANVKAVTDGYVYYAPADTYTNENIITYTEILNGMADMFEKAAQ

SEQ ID NO: 357 - DNA, 1233 bp, Corynebacterium glutamicum
  CDS (101)..(1210): RXS00156
accgagagcgtggtacgcctcatttagtttcctcctatgaatcttgatgtggttcatgcgtttttatgcaatatcaaccaaaagttggtacgatcctcatatgaatgaacgcacatcggatgcatttgacgccctccttgtgctctccttcggtggtcccgaagggcacgaggaggttcgtccgtttttggagaatgtcactcacggaagggggattccgccggaacgtctagatgaagtggcggttcattaccaccacttcggtggtatcagccccatcaatgcgctgaacagggaaattatcgccaatgtggaaaaagaattggcgtctcgcgatcacaagctgcctgtttattttggtaaccgcaactggaagccgtttgataatgaggccgctgaacaaatggctgatgacggcgtgaaaaacgcgctggtgttggcaacttccgcttggggtggctactccggttgtcggcagtaccaggaagatattcagggcatgatcaagcacctggagtctcaggggcagtcgatcacgttcaccaagctgcgtcagttctacgatcaccctcgttttgtctccaccatggctcaattggttcaggattcctacgcgaagcttcccgatgagctgcgagatgaggcgcgtctggtcttcaccgcgcactccattccactgactgcggacaatgctgcgggaacccctgaggatggctccttgtattccacacaggtcaaggaagcgtcagcactgattgctgaggctgttggtgtgtcagattttgatgtggtgtggcagtcccgctcgggtagcccgcacactccgtggctggagcctgacatcgtggatcacgcagtggagctcaacgagaagggtcaaaaagcgctcgttgtctgccctgtaggctttatttctgatcatatggaagtcatttgggatcttgattccgagctgatggaagaagccgagaagcgcaacatggtggtcgagcgtgtcgctaccgttggccccaccgatgaattcgcagcccttgtggttgatctcatcgaggaggcagagctcaagcgcgttatcgagcgccttggaaagctgccagcacgcggaagttccgtcaacggcgcaccgtgtggcgacggctgctgtggtaccgccaagcataaaaccgcgcgggtgaaccccaacgctcgctcagcggcgccagctgccaactaggagtgatagtccctcgcaaa

SEQ ID NO: 358 - protein, 370 aa, Corynebacterium glutamicum
MNERTSDAFDALLVLSFGGPEGHEEVRPFLENVTHGRGIPPERLDEVAVHYHHFGGISPINALNREIIANVEKELASRDHKLPVYFGNRNWKPFDNEAAEQMADDGVKNALVLATSAWGGYSGCRQYQEDIQGMIKHLESQGQSITFTKLRQFYDHPRFVSTMAQLVQDSYAKLPDELRDEARLVFTAHSIPLTADNAAGTPEDGSLYSTQVKEASALIAEAVGVSDFDVVWQSRSGSPHTPWLEPDIVDHAVELNEKGQKALVVCPVGFISDHMEVIWDLDSELMEEAEKRNMVVERVATVGPTDEFAALVVDLIEEAELKRVIERLGKLPARGSSVNGAPCGDGCCGTAKHKTARVNPNARSAAPAAN

SEQ ID NO: 359 - DNA, 810 bp, Corynebacterium glutamicum
  CDS (101)..(787): RXS00624
tccatgacgttttgaatggaaaatctccatttgtggagttagaagaagaccactagttttcaacaggacgacaacggccggacatgcgacaatacaatgcatgtccggccgtcttcttgtttcagtttctagtattttcgaccagacccgatcggcggctgacaggctcatttcagacctgcgagccgacggcatcgaggtctcattacttgtcgcaccccgcatcgatggggactggcgtctcgccaaagacaaagggaccctcgcgtggatggaacaacaacgcgaacgcggccacgaactcatcctcaacggtttcgaccaagcagttcagggacgtcgctcagaattcgccaaccttgaacggcacgaagcacgtcttcgccttaccggtgccattaggcaaatgcagaaaattggcttcgaattccaaatctttgccccacctcgttggagaatgtcagaaggcaccttcgcggtactcccagaatttgatttcaacgtcgccgcctcgaccaggggattacataacctcgacaccggcgaattcttggcgtgtagaaacctctccgtgggtgaaggttttggtgctgcaaaatggtggcgcaagaatgtcatcaaggctgtcactcgtggagcggaaaaaggaaatacagtgcgcttgtccgcatcggcgcgaaatctcaccaaccctaaagtcgcagctgacttccgggaagctgcattagctgccttggatttgggtgctcaggtgcaaacctattctcaggcggccgcacaactggcctagttggggaggttcggggcacc

SEQ ID NO: 360 - protein, 229 aa, Corynebacterium glutamicum
MSGRLLVSVSSIFDQTRSAADRLISDLRADGIEVSLLVAPRIDGDWRLAKDKGTLAWMEQQRERGHELILNGFDQAVQGRRSEFANLERHEARLRLTGAIRQMQKIGFEFQIFAPPRWRMSEGTFAVLPEFDFNVAASTRGLHNLDTGEFLACRNLSVGEGFGAAKWWRKNVIKAVTRGAEKGNTVRLSASARNLTNPKVAADFREAALAALDLGAQVQTYSQAAAQLA

SEQ ID NO: 361 - DNA, 1068 bp, Corynebacterium glutamicum
  CDS (101)..(1045): RXA00024
ttaagacatcaacatatggcttgtgctactgaaagatttttcttctgaaattctgtagaaacgctcctatgctcggggcagtaagttgtgagcataggaaatggagcacggcgtgaccgttattaaaggcactgaatttgatgttttcccactaaacctcggtggaaatacctttggctggacctcgaatagggaacagaccttcgcggttttggatgcattcgtggcagcgggaggaaactttgttgacaccgccgattcttattctgcatgggttgaaggcaatgagggtggcgagtcggagcgggagctcggcgcgtggattaaggaacgtggcgcagacaagctgatcattgctaccaagtctggtgcgttggagcctgttgctggtcgttcccgtgaggcaactttcaaggctgtcgagggttccctggagcgtttgggcgtggaatcgatcgatattttttactaccactacgacgatgaggcagtcagcattgatgagcaggttgctatcgctaatgatctgattgcacagggcaagattaagcacctcgcattgtctaactacagcgcggagcgtttagctgagttctttgagaagtctgtaggcactccagcgcagccggttgctctgcaaccgcactacaacctggtgtcgaggaaggattatgaggagaacgtgcagccactcgccgagaagcatggcgttgcagtcttcccttatttcgcgcttgccgcgggtcttttgaccggaaagtacacctccaaggaggatatttcgggtaaagcgcgtgcggggcagttggatcgttacgccagcgatgaggcgtttgccgtggtgacagagttgcgtgctgttgccgatgagttgggtgttgcgccaacgactgtggcgcttgcgtggttggttgcgcatggtgtgaccgcaccgattgcgtccgtgtccaaggtagagcagttgaaggatttgatggctgtgaaggatgtggagctgagcgctgagcagcttgcacgtttggataaggtttcggagcctttcgcttaagctctcctcaaaagtaagtg

SEQ ID NO: 362 - protein, 315 aa, Corynebacterium glutamicum
MEHGVTVIKGTEFDVFPLNLGGNTFGWTSNREQTFAVLDAFVAAGGNFVDTADSYSAWVEGNEGGESERELGAWIKERGADKLIIATKSGALEPVAGRSREATFKAVEGSLERLGVESIDIFYYHYDDEAVSIDEQVAIANDLIAQGKIKHLALSNYSAERLAEFFEKSVGTPAQPVALQPHYNLVSRKDYEENVQPLAEKHGVAVFPYFALAAGLLTGKYTSKEDISGKARAGQLDRYASDEAFAVVTELRAVADELGVAPTTVALAWLVAHGVTAPIASVSKVEQLKDLMAVKDVELSAEQLARLDKVSEPFA

SEQ ID NO: 363 - DNA, 1329 bp, Corynebacterium glutamicum
  CDS (101)..(1306): RXA02526
aggaaatgacactcaactagaaatcttttcttcagatgccacaatcgaaagctggttggctgcggagagagcactctcaactgctcaagcccgccatggtgtgatcactgaagacgatgctgcacagatcaaccaggcggcagtcctttccaacattgaccgcgagaagctgtgggaagatgccaaaaatgtcggctaccccatccttggcttggtaagacaaatcgccagtcaccttccagaaggccccaacgggcgagtccactacggcgccacgacccaagtcatcatggacactggactggtgttgcaaatgactgcctctttgaacgcccttgataaacagatcgtgcgtctggggaatgcactggcagcacgggctgaagagcacaaagacaccgtgatgccgggacgcacccatgctcagcaggcaattcccactacatttggagcaaccctcgctacctttttggatcaaatccgcaggcagagggaacgacttgaggaagcactcgagcgcgtgcgagtcatttcgctgtttggtgctggtggaaacaacgcagcacaaggcgaacaagcggcaacggttcgtgcagagatggcccgcctgttggatctgaaggacccggtggtgtcatggcatgtggaacgcgatgtgcttggggacttcggatgggtgtgctcaacgctgtgtggatcgatggcaaaatttggccgaaacatcgtggatctttcccgaactgaaatcggagaagtttttgagccttacaactcccatcggggtgcatcttccatgatgcctcagaaagtcaacccgatttcttccgagctcatgattggtatttcagtggtggcgggtgccttgacctcgactttgccacggcttcaggaatcgggacatgaacgagcagcaggagagtggcagggagaatggcttgtcattccaacgttggccaatctagctggcgctgcactcgatgaagccattgtggtggctgaaggaatgcgagtggatacagatcgtatgtcctcgaacttggcttttgctggtggattgatcatggcggaagctcagatgattcaactagctccagctctggggcgtgagaaagctcatgacttggtttatgaagcatccacaaagactcgtgaagagcacaccacgctggcagaagaactgccgataattgcagttcaacatggggtcgaagacctgttgcctaagaattttgcgcagcctgcagactacgtcggcgaagcacaatccatggtgaatgcagctgtcgccgcctggaatgcccaactttaacaacccaaaactttaacaac

SEQ ID NO: 364 - protein, 402 aa, Corynebacterium glutamicum
VITEDDAAQINQAAVLSNIDREKLWEDAKNVGYPILGLVRQIASHLPEGPNGRVHYGATTQVIMDTGLVLQMTASLNALDKQIVRLGNALAARAEEHKDTVMPGRTHAQQAIPTTFGATLATFLDQIRRQRERLEEALERVRVISLFGAGGNNAAQGEQAATVRAEMARLLDLKDPVVSWHVERDVLGDFGWVCSTLCGSMAKFGRNIVDLSRTEIGEVFEPYNSHRGASSMMPQKVNPISSELMIGISVVAGALTSTLPRLQESGHERAAGEWQGEWLVIPTLANLAGAALDEAIVVAEGMRVDTDRMSSNLAFAGGLIMAEAQMIQLAPALGREKAHDLVYEASTKTREEHTTLAEELPIIAVQHGVEDLLPKNFAQPADYVGEAQSMVNAAVAAWNAQL

SEQ ID NO: 365 - DNA, 1108 bp, Corynebacterium glutamicum
  CDS (101)..(1099): RXN02813
ggactctaaattgacccgatctttatactccgaccttgctggtagtggagaacacctcagcagcctttccgacgagactttcctaaagaatcttcttgtcgtggaggccgctttggcggttgcagctgcccccgagcacgcagcaatggcgaaggccaccattgattcttatcagttggatgtggaggagctttcccgtcgcgcagccgagggcggtaatccgctcattccgctggtcactgacctcaaggccatcaatccggcaggcatccacattggcgcaacgagccaggacatcattgattctgcgttaatgctgtgcatgaaggaaggggtgggggaggtcgtcgacaagcttaaaaagcttgcgcgagatttggccgagctcaccgcggagcataaagcaaccccgatcatggggcgcacgttggggcagatcgcgacgccgacgacgttcggcgcgctgaccggcggctggctggttgcggtggacaatgcggcacgcgccctggaggcgctggagtttccggtgtcgtatggcggtgccagcggaaatatgacggcggtgcacccgcgtggcttcgagattcaggcgaagctggccgaggagttgggcctttttgatccgcagtgggtgtggcattccgatcgcacgccgatcactgcgatcgcgtcggcgctggcaacggccgctggtgtggtacgcaaaattgctggtgacgtggtgttttactcacaaaccgaggtcggcgagttgcgggagaaatcccccggcggcagctccgcgatgccccacaaagccaatccggccgctgcgattgcgtgcgacggttacgcgcgccgggcacctggccttcttgcaacgcttttcgacgccctcgactgccgtttgcagcgcggcaccggcagctggcacgcggagtgggcaacgctgcgcgagttggctgctgtcactcactcagcagtgagcagggctgcaaccagcatcgatggcatcaccgtcaacgttgatgtgatggcaagtcgcgtcaatggaccaaccgggcacgccgaagatttggcggagcgggcactagaaatttatggaaaaggacgcagttaatggatc

SEQ ID NO: 366 - protein, 333 aa, Corynebacterium glutamicum
VEAALAVAAAPEHAAMAKATIDSYQLDVEELSRRAAEGGNPLIPLVTDLKAINPAGIHIGATSQDIIDSALMLCMKEGVGEVVDKLKKLARDLAELTAEHKATPIMGRTLGQIATPTTFGALTGGWLVAVDNAARALEALEFPVSYGGASGNMTAVHPRGFEIQAKLAEELGLFDPQWVWHSDRTPITAIASALATAAGVVRKIAGDVVFYSQTEVGELREKSPGGSSAMPHKANPAAAIACDGYARRAPGLLATLFDALDCRLQRGTGSWHAEWATLRELAAVTHSAVSRAATSIDGITVNVDVMASRVNGPTGHAEDLAERALEIYGKGRS

SEQ ID NO: 367 - DNA, 651 bp, Corynebacterium glutamicum
  CDS (1)..(642): FRXA02813
ggcgcgctgaccggcggctggctggttgcggtggacaatgcggcacgcgccctggaggcgctggagtttccggtgtcgtatggcggtgccagcggaaatatgacggcggtgcacccgcgtggcttcgagattcaggcgaagctggccgaggagttgggcctttttgatccgcagtgggtgtggcattccgatcgcacgccgatcactgcgatcgcgtcggcgctggcaacggccgctggtgtggtacgcaaaattgctggtgacgtggtgttttactcacaaaccgaggtcggcgagttgcgggagaaatcccccggcggcagctccgcgatgccccacaaagccaatccggccgctgcgattgcgtgcgacggttacgcgcgccgggcacctggccttcttgcaacgcttttcgacgccctcgactgccgtttgcagcgcggcaccggcagctggcacgcggagtgggcaacgctgcgcgagttggctgctgtcactcactcagcagtgagcagggctgcaaccagcatcgatggcatcaccgtcaacgttgatgtgatggcaagtcgcgtcaatggaccaaccgggcacgccgaagatttggcggagcgggcactagaaatttatggaaaaggacgcagttaatggatc

SEQ ID NO: 368 - protein, 214 aa, Corynebacterium glutamicum
GALTGGWLVAVDNAARALEALEFPVSYGGASGNMTAVHPRGFEIQAKLAEELGLFDPQWVWHSDRTPITAIASALATAAGVVRKIAGDVVFYSQTEVGELREKSPGGSSAMPHKANPAAAIACDGYARRAPGLLATLFDALDCRLQRGTGSWHAEWATLRELAAVTHSAVSRAATSIDGITVNVDVMASRVNGPTGHAEDLAERALEIYGKGRS

SEQ ID NO: 369 - DNA, 260 bp, Corynebacterium glutamicum
  CDS (1)..(237): RXA01113
ggcgatatttgggaacgtccaggccttgatcacactcagcgtcgcctgctcaccatcgcgattttgaccgcggtgggcaatgacggcgagttggacatgcacattcgtgctgctctgcgcgctggcgtggatcaggaaaccatcggcgaggtcatcctgcacactgcggtgtatgcgggtgtgccgaactccaaccatggtttcaagctgctgaacaacgctgtgtcagaccttcagtaattctcgaagctctccacggg

SEQ ID NO: 370 - protein, 79 aa, Corynebacterium glutamicum
GDIWERPGLDHTQRRLLTIAILTAVGNDGELDMHIRAALRAGVDQETIGEVILHTAVYAGVPNSNHGFKLLNNAVSDLQ

SEQ ID NO: 371 - DNA, 444 bp, Corynebacterium glutamicum
  CDS (101)..(421): RXA02126
tccgaggaagacatggcggcacttcaagaagtgaccgcccgcgattatggcgagcacagcggttttcctgtgtattccggcaagtagaaagatttttatcatgggacaaaaagtaaccgcaggtcgtgacatcctaggagagtttgcacctaagtccgctgaactcaacgatgatgtcctctttggccaggtgtggtcgagggaatcagagctttccccacgtgaccgaagcatcgtgatcgtgacaatgttgatggcaagtggcgtgctggatagtgcttttgaaagccacgttcagcgagccaaagacaacggtgtcactgctgaagaaatcgcagagatcatcacccacgtggccttttatgcaggttggccaaaggcttgggctgcgttccgcatcgcaaaggacatttacaccaagtaatagcgaggcagaaaacacat

SEQ ID NO: 372 - protein, 107 aa, Corynebacterium glutamicum
MGQKVTAGRDILGEFAPKSAELNDDVLFGQVWSRESELSPRDRSIVIVTMLMASGVLDSAFESHVQRAKDNGVTAEEIAEIITHVAFYAGWPKAWAAFRIAKDIYTK

SEQ ID NO: 373 - DNA, 1284 bp, Corynebacterium glutamicum
  CDS (101)..(1261): RXA01465
gagactggcgaggatggtaaccacgttcactacccattcgtcctggataaggaagactagtttttctacctagctagcattgaagtcccgaccacatcttgtggcgggacttttcccacttaaccagaaagccatagaaaaattgtctgatttaaccatccaaaaagtcgaatcccgtatcctcgacgttcccctcattcgcccacacggcttcgcaactaccacctccactgagcagcacattctgctggtcagcgtgcacttagaaaacggtgtcatcggctacggtgagggcgttgtgcccggcggtccatggtggggcggcgagtcggttgagaccatgaaggcgcttgtcgacggctacctcgccccagtgctcatcggccgtgctgtctccgagcttgcaggaattatggcagaccttgagcgtgttgttgcacgtgcgcgttatgccaaggcggctgttgacgtcgcaatgcatgatgcctgggcacgcagcctcaatgtgcccgtccgcgacctgcttggtggcaccgtgcgcgacaaggtggatgtcacctgggcgctgggcgttttgccgcttgatgttgcggtggcggaaattgaagagcgcatcgaggagtttggtaaccgttccttcaagttgaagatgggtgctggcgatcctgcggaagatactcgccgtgtagcagaattggcgcgcgaagttggcgaccgcgtttctctgcgcattgatattaacgcacgttgggatcgccgcaccgctctgcattacttgccgattctcgcggaggctggcgtcgagctgttcgagcagcccaccccggccgacgacctggaaaccctgcgcgaaatcacccgccgcaccaacgtttcggtcatggcagatgaatccgtgtggaccccagctgaagctctcgcggtggtgaaagcccaggctgcggatgttatcgcactgaaaaccactaagcacggtggtctgctggaatccaagaagatcgccgctatcgccgaagccggcgggctggcctgccatggtgcaaccagtctggaaggtccaatcggcaccgcagcatccctgcagtttgcggcatccaccaaggcgatctcctacggtacagaactgttcggaccgcagttgctcaaagatacctatattgtccaagaatttgagtacaaggacggccaggttgctattccacaaggcccaggtttgggcgtcgatgtggacatggacaaagtcaacttctacacccgtaaataaggagaattatcgatgctgtt

SEQ ID NO: 374 - protein, 387 aa, Corynebacterium glutamicum
VAGLFPLNQKAIEKLSDLTIQKVESRILDVPLIRPHGFATTTSTEQHILLVSVHLENGVIGYGEGVVPGGPWWGGESVETMKALVDGYLAPVLIGRAVSELAGIMADLERVVARARYAKAAVDVAMHDAWARSLNVPVRDLLGGTVRDKVDVTWALGVLPLDVAVAEIEERIEEFGNRSFKLKMGAGDPAEDTRRVAELAREVGDRVSLRIDINARWDRRTALHYLPILAEAGVELFEQPTPADDLETLREITRRTNVSVMADESVWTPAEALAVVKAQAADVIALKTTKHGGLLESKKIAAIAEAGGLACHGATSLEGPIGTAASLQFAASTKAISYGTELFGPQLLKDTYIVQEFEYKDGQVAIPQGPGLGVDVDMDKVNFYTRK

SEQ ID NO: 375 - DNA, 1137 bp, Corynebacterium glutamicum
  CDS (101)..(1114): RXA02316
tgcgcacctacggcgccgaattcccgctggtcctgcttaaagatggacaggcactgcttatcgacgaccacggcgtccacctaatttaggatggttccccatgagcaccccaactgttgatgagattctagagcgcgcccacgtggtgtcgctgccgatgcgtgtgaagtttcgtggcgtcaccaccagggaggctttgctgattgaaggccctgctggttggggagagttcgcgcccttccttgagtatgacccgcaagaatcggccagttggctaaagtccggcattgaagcagcgtgggagggttttccggcgccgttgcgtgatcgcgtggaagtcaatgccaccatcccagctgttccggccgatcaagtggcagaagttttggaccgtttcccaggctgtcgcaccatcaaagtaaaggtcgcggaaccaggccagaccttggctgatgacatcgcgcgagttgccgctgcccgtgaggcacgccccggcgcgatcatccgtgttgatgccaattgtgggtggagtgtggagcaggcggtggaggcggctcaggcgttggcgccgttggattatttagagcagccgtgtgccaccgtggaggaactggcggaagtgcgcatgacggtgcagcggcgcggactttttgtgcgcgttgcagcggatgaatcgatcagaaaatctgatgatccttatcgggtggcggatctgcgtgctgcggatgtggctgtggtgaaggttgctcctttgggtggtgtgaaaagggtacttgaggtggtgcaacatttgcgggcgcgcacgatggacatcactgtagcaagtgcgttggacacggttgtggggatgaatgctgggttggctgcggtggcggcgttgccgaagttggatgatgacgatctcattgatgtgccaccagcggcggcgggtcttgcgacttcgcagttgttcctggaggatgtcgcgaccccgcacgcaatcactgatgggttcatggaaacgcgtgtaattgccccggaaatggatcgtttggaaacgcttgctgccagcaaagataggcgtgattggtggtttgagcgcgtgcgtgaatcgtatccgtacctggagacgatctagactgttgtgcatgtccagca

SEQ ID NO: 376 - protein, 338 aa, Corynebacterium glutamicum
MSTPTVDEILERAHVVSLPMRVKFRGVTTREALLIEGPAGWGEFAPFLEYDPQESASWLKSGIEAAWEGFPAPLRDRVEVNATIPAVPADQVAEVLDRFPGCRTIKVKVAEPGQTLADDIARVAAAREARPGAIIRVDANCGWSVEQAVEAAQALAPLDYLEQPCATVEELAEVRMTVQRRGLFVRVAADESIRKSDDPYRVADLRAADVAVVKVAPLGGVKRVLEVVQHLRARTMDITVASALDTVVGMNAGLAAVAALPKLDDDDLIDVPPAAAGLATSQLFLEDVATPHAITDGFMETRVIAPEMDRLETLAASKDRRDWWFERVRESYPYLETI

SEQ ID NO: 377 - DNA, 414 bp, Corynebacterium glutamicum
  CDS (101)..(391): RXA01464
caaggacggccaggttgctattccacaaggcccaggtttgggcgtcgatgtggacatggacaaagtcaacttctacacccgtaaataaggagaattatcgatgctgtttctagcacgcatggacgtcgtcttccctgattccatggacgccgatgtgatggcagatttccaggctaaggaaaaggcctactccggagacctgcaatcccgtggaatcatgaaagcaatctggcgagtcgtcggcgagtatgcaaactactccattttcgatgtcgatgaccacgacgagctgcatgcaattcttagtggctttccgatgttcaaatacatgaatgtcaagatcactccactggcaaaacaccccaatgctctggagtattacctcaagggatagttgaggttctaaccgctcta

SEQ ID NO: 378 - protein, 97 aa, Corynebacterium glutamicum
MLFLARMDVVFPDSMDADVMADFQAKEKAYSGDLQSRGIMKAIWRVVGEYANYSIFDVDDHDELHAILSGFPMFKYMNVKITPLAKHPNALEYYLKG

SEQ ID NO: 379 - DNA, 1119 bp, Corynebacterium glutamicum
  CDS (101)..(1096): RXA02603
gcatggtgcttggcgtgcattacccaaccgatgtgctagccggcgcgttgttgggagcagcgaccgcagaggccgtccataagatcgaaagggctacgaagtgagcgaacacgccgctgaacatcaccgcgatacccaaaatttcttaacctccgaaccgcacaccacggcaatcgaagacaacaagaagcgccaaccgccgaaaaaccttgctgacggcatgatcaaggcgctgcgccccaagcagtgggtcaagaacgttcttgtgctagcagcaccacttgctgctggtgcagatgcgatcttcaaccagcgcacgatcatcgacgttgctatcgcattcgtagtgttctgcttcggtgcatcagccatttacttggttaatgatgcccgtgacgtggaagctgaccgcgagcacccaaccaagcgtttccgccccatcgctgcaggagtcctgccagtaggaatggcatacggcatggccgtggcgctcattgcactatccatcggactgtctttcctcgccaccgacggcgtggcacttgcctgcgtgattggcgtgtacattgcgctgcagctgggatactgcttcggttggaagcacatgccagtgatcgatattgcgcttgtctcctccggattcatgctccgcgcaatggcaggtggtgtcgcagcaggcatcgagctatcccagtggttcctgctagtcgctgcgtttggttccctgttcatggcatctggaaagcgctacgcagaaatccttctgcacgagcgcaccggcgctaagatccgcaagtccctggaaagctacacccccacctacctgcgcttcgtttggaccatggcagcaacagcagtggtcatgtcctacgcactgtggggcttcgacctttcccaacactccaccgacgcaggtccgtggtaccaaatctccatggttccattcaccatcgccatcctgcgctacgcagccggcgtagacaccggcgacggcggtgcccctgacgaagtggcactcagcgacaaagttctgcaggtactagccctagcatgggttttctgcatcgtgatggctgtgtacatcatgccgatgttttgaatatttaccaatgaacatgc

SEQ ID NO: 380 - protein, 332 aa, Corynebacterium glutamicum
VSEHAAEHHRDTQNFLTSEPHTTAIEDNKKRQPPKNLADGMIKALRPKQWVKNVLVLAAPLAAGADAIFNQRTIIDVAIAFVVFCFGASAIYLVNDARDVEADREHPTKRFRPIAAGVLPVGMAYGMAVALIALSIGLSFLATDGVALACVIGVYIALQLGYCFGWKHMPVIDIALVSSGFMLRAMAGGVAAGIELSQWFLLVAAFGSLFMASGKRYAEILLHERTGAKIRKSLESYTPTYLRFVWTMAATAVVMSYALWGFDLSQHSTDAGPWYQISMVPFTIAILRYAAGVDTGDGGAPDEVALSDKVLQVLALAWVFCIVMAVYIMPMF

SEQ ID NO: 381 - DNA, 470 bp, Corynebacterium glutamicum
  CDS (1)..(447): RXN02839
tgtgtggtgaatgattatgctgaccgcaagtttgatggtcatgttaagcgcacggcgaaccgaccacttcccagcggcgcggtaacagagaaagaggcgcgcgcgctgtttgtcgtgctggtactgatttcgtttttactggtgctgacgctgaatacgatgaccattctgttgtcgattgccgcgctagcgctggcgtgggtgtacccgtttatgaagcggtatacccatctaccgcaagtggtgctgggcgcggcgtttggctggtcgattccaatggcttttgccgctgtgagtgagtcggtgccattgagttgctggttaatgttcctcgccaatattctctgggcggtggcttacgacacgcagtatgcgatggttgaccgcgatgatgatgtgaagattggcattaaatccacggcaatcctgttggccaatacgataaattgatattgggattttgcagattg

SEQ ID NO: 382 - protein, 149 aa, Corynebacterium glutamicum
CVVNDYADRKFDGHVKRTANRPLPSGAVTEKEARALFVVLVLISFLLVLTLNTMTILLSIAALALAWVYPFMKRYTHLPQVVLGAAFGWSIPMAFAAVSESVPLSCWLMFLANILWAVAYDTQYAMVDRDDDVKIGIKSTAILLANTIN

SEQ ID NO: 383 - DNA, 417 bp, Corynebacterium glutamicum
  CDS (1)..(417): FRXA02839
tgtgtggtgaatgattatgctgaccgcaagtttgatggtcatgttaagcgcacggcgaaccgaccacttcccagcggcgcggtaacagagaaagaggcgcgcgcgctgtttgtcgtgctggtactgatttcgtttttactggtgctgacgctgaatacgatgaccattctgttgtcgattgccgcgctagcgctggcgtgggtgtacccgtttatgaagcggtatacccatctaccgcaagtggtgctgggcgcggcgtttggctggtcgattccaatggcttttgccgctgtgagtgagtcggtgccattgagttgctggttaatgttcctcgccaatattctctgggcggtggcttacgacacgcagtatgcgatggttgaccgcgatgatgatgtgaagattggcattaaatcc

SEQ ID NO: 384 - protein, 139 aa, Corynebacterium glutamicum
CVVNDYADRKFDGHVKRTANRPLPSGAVTEKEARALFVVLVLISFLLVLTLNTMTILLSIAALALAWVYPFMKRYTHLPQVVLGAAFGWSIPMAFAAVSESVPLSCWLMFLANILWAVAYDTQYAMVDRDDDVKIGIKS

SEQ ID NO: 385 - DNA, 1356 bp, Corynebacterium glutamicum
  CDS (101)..(1333): RXA01502
gctcgccgagggtttcggccttttaactagcatggtgtatagatccatgcggtcgaccttgcgcctgaccgtccacttttttagggactaggagtacagcatgagcacaccacaaagcatcgtcattatcggcggcggtttagccggagcgaaaaccgcagaggcactacgtgtaaacgggtatgaaggctccatcacgctcatcgcagcagaggattatctgccatatgagcgcccaccgctgtcaaaggagtacatggctggaaaagtgggctttgacaaggcgattgttcacccggcggagtggtacaaagaaaacaatgtcacgctgcgtcaaggtgtgcgtgcaacggcaattgatgcgggttcacgccaagtcaccgttgatgatggcggaaacactgagaccattaactacgacaaactagttcttgctactggatcagcagtgcgcaaacttccaattccgggagccgacgcctctaatgtgcactacctgcgcaccgtggaagactctgacgcgatcaaggcaaccttcggtgaaggtaaaaagctggtcctcatcggtggtggctggatcggactcgaagtcgcatcagcggcacgaggagctggcactgacgtcactgttttggaaggtggaaagctcccacttttgaaagtccttggtgaaacggtcgcgcaagtctttgccgatctgcatgtggcaaacggcgttgacctgcgcaccgaagtgaaaattacggacatcgtcaccgaagatggacgtgcagttggcgtgcgacttgatgacggcgaagtggttcccgcagacgcagtagtcattggcatcggtgtcaccccagtgattgacctagcggaaactgctggactggaaatcgacaatggtgttttggtggacgcagcactgcgtaccagcgacccggatatctacgcagttggagacattgcgaaccacgatcacccagttctaggacaccgcatccgcgtggagcactgggccaccgcgttgaatcaacctgcggctgcggtgaaatccctacttggcaaagacgccgagtttaccaaccttccgtacttctttacagatcaattcgatctgggttgtgaatacgtcggccacgccaccggttcgcaggagaaggtattcatccgtggaaaccttgaaacacgagaatttgtcgccttctgggttgatactgaaaaccgaattctcgccgcaatgaacgtgaatgtgtgggatgttcctgatcaaatcaagcctctcatcgcatcaggaaagagcgttgacaccgagaagctagtggatccagaagttccgtattcagagctctaagcagtgtgtttgatggccgc

SEQ ID NO: 386 - protein, 411 aa, Corynebacterium glutamicum
MSTPQSIVIIGGGLAGAKTAEALRVNGYEGSITLIAAEDYLPYERPPLSKEYMAGKVGFDKAIVHPAEWYKENNVTLRQGVRATAIDAGSRQVTVDDGGNTETINYDKLVLATGSAVRKLPIPGADASNVHYLRTVEDSDAIKATFGEGKKLVLIGGGWIGLEVASAARGAGTDVTVLEGGKLPLLKVLGETVAQVFADLHVANGVDLRTEVKITDIVTEDGRAVGVRLDDGEVVPADAVVIGIGVTPVIDLAETAGLEIDNGVLVDAALRTSDPDIYAVGDIANHDHPVLGHRIRVEHWATALNQPAAAVKSLLGKDAEFTNLPYFFTDQFDLGCEYVGHATGSQEKVFIRGNLETREFVAFWVDTENRILAAMNVNVWDVPDQIKPLIASGKSVDTEKLVDPEVPYSEL

SEQ ID NO: 387 - DNA, 572 bp, Corynebacterium glutamicum
  CDS (15)..(572): RXA02828
  misc_feature (71): n=a,c,g, or t
agtcaggatttatgatgaaacgacgtgacttcctgtcggcgctttctgccggcaccctctcgctgggcggntttgcgccccaactgctgctggcccaagggatgaatcagccaatgcgcgcgcccattcatgtgggtaaatcgggcctgcgcgcccgcgacgccgaggcgcttgccacctggtaccaaagccacgtcggcctgcaagaaattggccgcgacggcgcgacgatccacatgggtgcgggcggcaccgtgctgctggaaatcacgcagtacgacggtatcgtgctggcgcccatgcgcgtcgcgggcctttatcacaacgcgttcctgctgcccgcgcgcgcggatctggcgcggtgggtgctggacgcctcggcacggcaactgcggatcgacggctatgccgaccaccttgtcagcgaggcgatgtacctgaccgaccccgaaggcaacggcgtcgaaatctacgccgaccgccccgccagcgactgggtctggcgcaatggtcaggtcgagatggacagcctgcaaatcgacttctacagcatgatcgccacgcttgacggc

SEQ ID NO: 388 - protein, 186 aa, Corynebacterium glutamicum
MKRRDFLSALSAGTLSLGGFAPQLLLAQGMNQPMRAPIHVGKSGLRARDAEALATWYQSHVGLQEIGRDGATIHMGAGGTVLLEITQYDGIVLAPMRVAGLYHNAFLLPARADLARWVLDASARQLRIDGYADHLVSEAMYLTDPEGNGVEIYADRPASDWVWRNGQVEMDSLQIDFYSMIATLDG

SEQ ID NO: 389 - DNA, 762 bp, Corynebacterium glutamicum
  CDS (101)..(739): RXA02064
ctagattacatcctgtgcatcttctggcaattgtgaattcatttgcacttaatgcgtgtaggtacttcacatctcgcctgctcgctctagactataacgcgtgagtaacgccttcgagtatcttcgcacttatgtcgagtccactactgaaaccgacgctgctgtagcgcgcgctcgtgaagacgccgccgagttcggtctccccgccccggatgaaatgactggccagctgctaaccactttggctgccaccaccaatggcaacggctccactggtgccatcgcgattaccccggctgccgggttggtgggtctgtatatcctgaacggactggccgataacaccacactgacctgcattgatcctgaatcagagcatcagcgccaggccaaagcactcttccgcgaggccggctattcccccagccgcgtacgcttcttgctctcgcgcccgctcgacgtgatgagtcgccttgccaacgacagctatcagcttgtcttcggccaagtctcccccatggatttaaaggcgcttgtcgacgccgcctggccgcttcttcgacgaggcggtgcgctggtgctcgccgatgcgctccttgacggcaccattgcggatcaaacccgcaaggatcgtgacacccaagcagcacgtgacgccgatgaatatattcgttccattgaaggcgcacacgttgctcgcctgccccttggtgcaggcttaaccgtggtgactaaagcctagagggggacgtcgagaagcga

SEQ ID NO: 390 - protein, 213 aa, Corynebacterium glutamicum
VSNAFEYLRTYVESTTETDAAVARAREDAAEFGLPAPDEMTGQLLTTLAATTNGNGSTGAIAITPAAGLVGLYILNGLADNTTLTCIDPESEHQRQAKALFREAGYSPSRVRFLLSRPLDVMSRLANDSYQLVFGQVSPMDLKALVDAAWPLLRRGGALVLADALLDGTIADQTRKDRDTQAARDADEYIRSIEGAHVARLPLGAGLTVVTKA

SEQ ID NO: 391 - DNA, 978 bp, Corynebacterium glutamicum
  CDS (101)..(955): RXN00639
agtgttgttatcgagttcagccgatcacaaagatttttccgctaggcagtgatccgactcgcaccccctacttcacccccaaagtctctaggagtatgacatgacttcagctgaacagatcgttgatccaacagcccacgattcgggcaacaaggcaactgacaagttcaaggcaaaccgcgtttcctccgatacctccaaggaacgcgcaaacgcgatctacgtagatctgctcgcggcgatcgcccaggttgctcacaagcacgaagtcacctacgaagagtacgcagtgctcaagcagtggatgatcgacgttggagaatacggcgagtggccactgtggttggacgttttcgttgagcatgagatcgaagagatcaactacaaccgccacgactacaccggaaccaagggttccatcgaaggcccttattacgtagagaactctccgaagctcccttgggatgctgaaatgccaatgcgtgacaaggaccgcgcatgcaccccactgatcttcgaggggcaggttactgacctcgacggcaacggtcttgatggagcagaagttgagctctggcacgcagatgaggacggatactactcccagttcgcgcctggaatcccagagtggaacctgcgtggcaccatcgttaccgatgaggaaggccgctacaagatcaagaccctgcagcctgcgccttaccagatccctcatgatggcccaaccggttggttcattgagtcttacggtgggcacccatggcgcccagcccacctccacttgcgcgtttcccacccgggctaccgcaccatcaccacccagctttacttcgagggtggcgagtgggtcgaaaacgacgttgcaaccgctgtgaagccagaactggtcctgcaccctgagactggcgaggatggtaaccacgttcactacccattcgtcctggataaggaagactagtttttctacctagctagcat

SEQ ID NO: 392 - protein, 285 aa, Corynebacterium glutamicum
MTSAEQIVDPTAHDSGNKATDKFKANRVSSDTSKERANAIYVDLLAAIAQVAHKHEVTYEEYAVLKQWMIDVGEYGEWPLWLDVFVEHEIEEINYNRHDYTGTKGSIEGPYYVENSPKLPWDAEMPMRDKDRACTPLIFEGQVTDLDGNGLDGAEVELWHADEDGYYSQFAPGIPEWNLRGTIVTDEEGRYKIKTLQPAPYQIPHDGPTGWFIESYGGHPWRPAHLHLRVSHPGYRTITTQLYFEGGEWVENDVATAVKPELVLHPETGEDGNHVHYPFVLDKED

SEQ ID NO: 393 - DNA, 760 bp, Corynebacterium glutamicum
  CDS (101)..(760): FRXA00639
agtgttgttatcgagttcagccgatcacaaagatttttccgctaggcagtgatccgactcgcaccccctacttcacccccaaagtctctaggagtatgacatgacttcagctgaacagatcgttgatccaacagcccacgattcgggcaacaaggcaactgacaagttcaaggcaaaccgcgtttcctccgatacctccaaggaacgcgcaaacgcgatctacgtagatctgctcgcggcgatcgcccaggttgctcacaagcacgaagtcacctacgaagagtacgcagtgctcaagcagtggatgatcgacgttggagaatacggcgagtggccactgtggttggacgttttcgttgagcatgagatcgaagagatcaactacaaccgccacgactacaccggaaccaagggttccatcgaaggcccttattacgtagagaactctccgaagctcccttgggatgctgaaatgccaatgcgtgacaaggaccgcgcatgcaccccactgatcttcgaggggcaggttactgacctcgacggcaacggtcttgatggagcagaagttgagctctggcacgcagatgaggacggatactactcccagttcgcgcctggaatcccagagtggaacctgcgtggcaccatcgttaccgatgaggaaggccgctacaagatcaagaccctgcagcctgcgccttaccagatccctcatgatggcccaaccggttggttcattgagtcttacggtgggcaccca

SEQ ID NO: 394 - protein, 220 aa, Corynebacterium glutamicum
MTSAEQIVDPTAHDSGNKATDKFKANRVSSDTSKERANAIYVDLLAAIAQVAHKHEVTYEEYAVLKQWMIDVGEYGEWPLWLDVFVEHEIEEINYNRHDYTGTKGSIEGPYYVENSPKLPWDAEMPMRDKDRACTPLIFEGQVTDLDGNGLDGAEVELWHADEDGYYSQFAPGIPEWNLRGTIVTDEEGRYKIKTLQPAPYQIPHDGPTGWFIESYGGHP

SEQ ID NO: 395 - DNA, 1584 bp, Corynebacterium glutamicum
  CDS (101)..(1561): RXN01653
ttcattcagggtgaatgctctccttgtttcagatgttcaacgctccataaagtagaccgcaatctagacaaagatgtctattttaattaaggagcagaacatggccacggccgagaacacaacacaggagaatcggaaaatcctgttcaacgcatttgatatgaactgcgttgcgcatcagtccccaggactgtggacacacccgaaggataaggcgcgagactacaacactcttgattactgggtgcaccttgccaagactttggagaagggccttttcgacggccttttcatcgcagatgtgcttggaacttacgatgtttatggttctagtaatgaagcggcgttgagcagtggtgcgcaggtgcctgtcaatgatccgatccttcttgtttctgcgatggcctatgccacaaagaacctcgggtttggcattactgcaggtactgcctatgagcacccgtatccttttgcgcggcgtctggccacacttgatcacctgactaatgggcgtgtggggtggaatgtggttactggctatcttccctctgctgctcaaaacatgggtgacaccgatcagctgccacatgatgagcgctatgacaaagcagatgaatacctggaagtgatctacaagcttctcgagggctcctgggaagacgatgctgttcaaaacaatacggagacgagtgtctttacggactcctccaaagtgcacgccattaatcatcatggcaagtactttgatgtgccgggcattgccatcactgagccgagtgtgcagcgtacgccggtgatctaccaggcgggtgcatcgccgcgcggattgaaattcgctggtgagaatgcagaagcagtgtttatcaattccagcaccgtggaggcaatcaccaagactgtcgcaaaaattcgcgctgctgcggtcgctgcgggacgtgatccacatgcggtgaagatctttgcgatgcaaaccatcatcactggtgaaacagaagcagatgcgcaggcaaagctggaggaatacagtcgctatatcgatcctgtcggtggtctgaccttgatgtctggatggaccggcgcggatctgtcgcagtatgacctggatgaaccgatcaccaatattgagtcaaacgctattcagtccactgcagccaccattagcaacggcaccggtgaaggtgcgtggacggtacgcaaactgggtgaggcaaccggcatcggcggcttcggaccagtgcttgtgggatctggcgctaacgttgccgcggaacttgcacgcatccaggatctcagcgatgttgatggtttcaaccttgcttatgccatcaccccaggaacttttgaagatgtcgtggactttgtggtgcctgagctgcaaaaacttagccgctacaagacggaatacgcgccgggttccttgcgcaacaaattgctcggtaaaggtgatcgcctggacgatacccaccgcggcgcaagctaccgcctaggcgctcggaactccaccgccactattgatctcagttccatatccgcccaactagtttcccagggagcccactcatgatctcaccgcaaacaatcatc

SEQ ID NO: 396 - protein, 487 aa, Corynebacterium glutamicum
MATAENTTQENRKILFNAFDMNCVAHQSPGLWTHPKDKARDYNTLDYWVHLAKTLEKGLFDGLFIADVLGTYDVYGSSNEAALSSGAQVPVNDPILLVSAMAYATKNLGFGITAGTAYEHPYPFARRLATLDHLTNGRVGWNVVTGYLPSAAQNMGDTDQLPHDERYDKADEYLEVIYKLLEGSWEDDAVQNNTETSVFTDSSKVHAINHHGKYFDVPGIAITEPSVQRTPVIYQAGASPRGLKFAGENAEAVFINSSTVEAITKTVAKIRAAAVAAGRDPHAVKIFAMQTIITGETEADAQAKLEEYSRYIDPVGGLTLMSGWTGADLSQYDLDEPITNIESNAIQSTAATISNGTGEGAWTVRKLGEATGIGGFGPVLVGSGANVAAELARIQDLSDVDGFNLAYAITPGTFEDVVDFVVPELQKLSRYKTEYAPGSLRNKLLGKGDRLDDTHRGASYRLGARNSTATIDLSSISAQLVSQGAHS

SEQ ID NO: 397 - DNA, 460 bp, Corynebacterium glutamicum
  CDS (101)..(460): FRXA00797
ttcattcagggtgaatgctctccttgtttcagatgttcaacgctccataaagtagaccgcaatctagacaaagatgtctattttaattaaggagcagaacatggccacggccgagaacacaacacaggagaatcggaaaatcctgttcaacgcatttgatatgaactgcgttgcgcatcagtccccaggactgtggacacacccgaaggataaggcgcgagactacaacactcttgattactgggtgcaccttgccaagactttggagaagggccttttcgacggccttttcatcgcagatgtgcttggaacttacgatgtttatggttctagtaatgaagcggcgttgagcagtggtgcgcaggtgcctgtcaatgatccgatccttcttgtttctgcgatggcctatgccacaaagaacctcgggtttggcattactgcaggtactgcctatgagcac

SEQ ID NO: 398 - protein, 120 aa, Corynebacterium glutamicum
MATAENTTQENRKILFNAFDMNCVAHQSPGLWTHPKDKARDYNTLDYWVHLAKTLEKGLFDGLFIADVLGTYDVYGSSNEAALSSGAQVPVNDPILLVSAMAYATKNLGFGITAGTAYEH

SEQ ID NO: 399 - DNA, 962 bp, Corynebacterium glutamicum
  CDS (1)..(939): FRXA01653
ggaagtgatctacaagcttctcgagggctcctggaagacgatgctgttcaaaacaatacggagacgagtgtctttacggactcctccaaagtgcacgccattaatcatcatggcaagtactttgatgtgccgggcattgccatcactgagccgagtgtgcagcgtacgccggtgatctaccaggcgggtgcatcgccgcgcggattgaaattcgctggtgagaatgcagaagcagtgtttatcaattccagcaccgtggaggcaatcaccaagactgtcgcaaaaattcgcgctgctgcggtcgctgcgggacgtgatccacatgcggtgaagatctttgcgatgcaaaccatcatcactggtgaaacagaagcagatgcgcaggcaaagctggaggaatacagtcgctatatcgatcctgtcggtggtctgaccttgatgtctggatggaccggcgcggatctgtcgcagtatgacctggatgaaccgatcaccaatattgagtcaaacgctattcagtccactgcagccaccattagcaacggcaccggtgaaggtgcgtggacggtacgcaaactgggtgaggcaaccggcatcggcggcttcggaccagtgcttgtgggatctggcgctaacgttgccgcggaacttgcacgcatccaggatctcagcgatgttgatggtttcaaccttgcttatgccatcaccccaggaacttttgaagatgtcgtggactttgtggtgcctgagctgcaaaaacttagccgctacaagacggaatacgcgccgggttccttgcgcaacaaattgctcggtaaaggtgatcgcctggacgatacccaccgcggcgcaagctaccgcctaggcgctcggaactccaccgccactattgatctcagttccatatccgcccaactagtttcccagggagcccactcatgatctcaccgcaaacaatcatc

SEQ ID NO: 400 - protein, 313 aa, Corynebacterium glutamicum
GSDLQASRGLLEDDAVQNNTETSVFTDSSKVHAINHHGKYFDVPGIAITEPSVQRTPVIYQAGASPRGLKFAGENAEAVFINSSTVEAITKTVAKIRAAAVAAGRDPHAVKIFAMQTIITGETEADAQAKLEEYSRYIDPVGGLTLMSGWTGADLSQYDLDEPITNIESNAIQSTAATISNGTGEGAWTVRKLGEATGIGGFGPVLVGSGANVAAELARIQDLSDVDGFNLAYAITPGTFEDVVDFVVPELQKLSRYKTEYAPGSLRNKLLGKGDRLDDTHRGASYRLGARNSTATIDLSSISAQLVSQGAHS

SEQ ID NO: 401 - DNA, 780 bp, Corynebacterium glutamicum
  CDS (101)..(757): RXN02530
gaggctgagctttccgtcaaacaacatcttcccaatgtggatgaaatgactgtgaccatcaccccttccaaaccttgagtcccgtgatacaattgttgatatgtcaacaaattatgaagcaatcatcattggagcaggtcaggctggactcgcggcggcgcatgaactttcccgccgcggtttcactcccggaaaagattttctcgtcctcgattccaacgacgggcccggtggcgcctggcggcataggtgggattcactcacattaggtaaagcccacggaatcgccgatctcccagggcttcccatgaatcgccccgatccgaaaactccggcttccacattggttgctggttattacggcgcttacgagaacgagttctccttcgcagttgtgcgcccagtcaaagtctcacgagttgagcccacttccgaggatccttcgagcccattgcgcgtgagcagcgacgatggtcgagagtggattacccgcatggttcttaatgcaacaggtacgtggacaaacccttatgttccgtacattcctggcatcgataaattccagggcaagcagctccacaccgttaattaccgcaaggccgaggatttcaaaggtaagaaagtcctggtcgtcggcggtggtttgagtgctgtgcaatttctgctggagttggaaggcttggcggaaaccacctgggcgacgcgtcgtccgcgaacttacgcagcgcgagttcgacgccggctggggcattgcggttgagcgcgccgtccgcgaacgca

SEQ ID NO: 402 - protein, 219 aa, Corynebacterium glutamicum
MSTNYEAIIIGAGQAGLAAAHELSRRGFTPGKDFLVLDSNDGPGGAWRHRWDSLTLGKAHGIADLPGLPMNRPDPKTPASTLVAGYYGAYENEFSFAVVRPVKVSRVEPTSEDPSSPLRVSSDDGREWITRMVLNATGTWTNPYVPYIPGIDKFQGKQLHTVNYRKAEDFKGKKVLVVGGGLSAVQFLLELEGLAETTWATRRPRTYAARVRRRLGHCG

SEQ ID NO: 403 - DNA, 492 bp, Corynebacterium glutamicum
  CDS (20)..(469): FRXA02530
cgatctcccagggcttcccatgaatcgccccgatccgaaaactccagctggcacattggttgctggttattacggcgcttacgagaacgagttctccttcgcagttgtgcgcccagtcaaagtctcacgagttgagcccacttccgaggatccttcgagcccattgcgcgtgagcagcgacgatggtcgagagtggattacccgcatggttcttaatgcaacaggtacgtggacaaacccttatgttccgtacattcctggcatcgataaattccagggcaagcagctccacaccgttaattaccgcaaggccgaggatttcaaaggtaagaaagtcctggtcgtcggcggtggtttgagtgctgtgcaatttctgctggagttggaaggcttggcggaaaccacctgggcgacgcgtcgtccgcgaacttacgcagcgcgagttcgacgccggctggggcattgcggttgagcgcgccgtccgcgaacgca

SEQ ID NO: 404 - protein, 150 aa, Corynebacterium glutamicum
MNRPDPKTPAGTLVAGYYGAYENEFSFAVVRPVKVSRVEPTSEDPSSPLRVSSDDGREWITRMVLNATGTWTNPYVPYIPGIDKFQGKQLHTVNYRKAEDFKGKKVLVVGGGLSAVQFLLELEGLAETTWATRRPRTYAARVRRRLGHCG

SEQ ID NO: 405 - DNA, 1533 bp, Corynebacterium glutamicum
  CDS (101)..(1510): RXA02083
tttttgtacatggtctgtggcacgcattgtttcgtttgccctgccatgttggtgttttaagtgaaggccgccttttgcggaatgggtataggaggcattcatggagatggttatgaagaataagcgcgttgcgattattggtgcaggtccgagtggtatcgctcagttgagggcgtttgagtctgctgaaaagcaggggcatgagatccctgagctggtgtgttttgaaaagcaggatacctggggtgggcagtggaattactcttggcgcacgggaacagactcttatggtgagcctgtgcactcaagtatgtaccgaaacctgtggtcaaacggtccgaaggaagttctcgaatttgctgagtacagcttcgatgagcacttcggaaagccaatttcttcttaccctccacgtgaagtgttgtgggattacattgcaggtcgtgcaaagaagtcgaacgttgagaagtacatcaagttcgcgcatgttgttcgctgggtgagttttgatgaggccaccaagctgttcaccgtgacggtggagaacctccgcaccggtgagaccagcagtgatacttatgacaacgtgattgttggcgctggacacttcagcttcccgaacgtccctcactttgatggtgtggagactttcccaggtcagatcatgcatgctcacgagttccgtggtgcagaggctgttgctgacaaggatattttgctgattggtgcaagttattctgcggaagatatcggtacccaggcgtacaagatgggtgctcgttcggtgactttctcttaccgctcaaacccaatggggtatgagtggcctgaagagatgactgagcttcctttggttgagcgtttcgacggctccgaggttcactttgtcaatggtgaaaagcgcaaggtcgacatcgtggtgttctgtactggttacttacaccattacccatttatgccgtctgagctgactttaagctcaccaaacaacctgtacccggatacgctttatcgtggcgtggtgtccgaggctaataaccagctgttctggttgggtgctcaggatcagtggctgacgttcaacatgtttgatgctcaggcttggtatgttcgcgatgtcattttgggccgcgtggctcttccttccaaggaagcgcagcgcaatcatatggataagtggctgtcacgtttcgaaggcttgaagtctgagaatgatcagattgatttccagtgcgattacgtcgaggatcttatcgatcagaccgattatccttcgtttgatctgaaggaagtcgcgaatatcttgaagggctgggtgaagtcgaaggaggaggatatcctcaactaccgtgattacacctatacttccgtgatgacgggcaccacctctgttgaacaccacactccgtggatgattgagttggatgattctttggagcgttacctcagtgagccacaggaagatgaagctcgtcaggtttaccgtggcaagaaagtccgcgataaagcctaaggaaaaggcctaagcagccc

SEQ ID NO: 406 - protein, 470 aa, Corynebacterium glutamicum
MEMVMKNKRVAIIGAGPSGIAQLRAFESAEKQGHEIPELVCFEKQDTWGGQWNYSWRTGTDSYGEPVHSSMYRNLWSNGPKEVLEFAEYSFDEHFGKPISSYPPREVLWDYIAGRAKKSNVEKYIKFAHVVRWVSFDEATKLFTVTVENLRTGETSSDTYDNVIVGAGHFSFPNVPHFDGVETFPGQIMHAHEFRGAEAVADKDILLIGASYSAEDIGTQAYKMGARSVTFSYRSNPMGYEWPEEMTELPLVERFDGSEVHFVNGEKRKVDIVVFCTGYLHHYPFMPSELTLSSPNNLYPDTLYRGVVSEANNQLFWLGAQDQWLTFNMFDAQAWYVRDVILGRVALPSKEAQRNHMDKWLSRFEGLKSENDQIDFQCDYVEDLIDQTDYPSFDLKEVANILKGWVKSKEEDILNYRDYTYTSVMTGTTSVEHHTPWMIELDDSLERYLSEPQEDEARQVYRGKKVRDKA

SEQ ID NO: 407 - DNA, 1017 bp, Corynebacterium glutamicum
  CDS (101)..(994): RXA00892
ttgatcgctgcgaaatcgggcagctggtagggcaaggtgctgggcttgagcaggtgttcaacagtcatagtgaccgatactagttgctagagttttcatcatgtctgccacctcttccgtcaccgttgaatgcccggcgggaaccatcaccggcgagccccattatttccgctcgattccctacgcaaaggcgcgcccgtttgctgatgccgaaaagctagaacccctgcgcattgatgcgaccggcaagcacgagggtctctatttaacgttggcaaccccggaggcacggttcggcgcggatgccccggtgatcgtttatatccacggcggaggatatgacggtggcacgcgtttcgatgcccgcaccgagcccactttcttccgtgagcagggctttgtggtggtctccatcgattaccgcgtcggcctggagggctttgcgcgcttccacgacgacgaggccaatcgttaccgcggcatcgatgattgcgtgctcgcgctggagtgggtgcagaaaaacatcgagcatttcggcggcgatcccaccaacgtcaccctcatcgggcagtccgcgggcgccggcatcgcgctctggctcacgcgcctagaccactataaaggtgcttttcgacgcctggttgcgctctcccccagcttcccgcgccagccattcgctgcccgaaaaggtgctttacgacgcgccctgggcaaacccgtcacccgcgcctcgctggcgggcatcaagcccgcacgcttggacaaaggctaccgtcgctttgctcgccgctacttcaccgacctggcactcggccctaccccatacgacccgaatgagctggccgacatcgatttgatcatctcctccacccgcgatgaaatgtacggacaccgcgcaggcttatggttcgaccagcgtggcttcggcgcaaaactggccgcgcgactttttggcctggagaattcggataccaatattaaggaagccccaagatgacaaccgcgttgtaggccgca

SEQ ID NO: 408 - protein, 298 aa, Corynebacterium glutamicum
MSATSSVTVECPAGTITGEPHYFRSIPYAKARPFADAEKLEPLRIDATGKHEGLYLTLATPEARFGADAPVIVYIHGGGYDGGTRFDARTEPTFFREQGFVVVSIDYRVGLEGFARFHDDEANRYRGIDDCVLALEWVQKNIEHFGGDPTNVTLIGQSAGAGIALWLTRLDHYKGAFRRLVALSPSFPRQPFAARKGALRRALGKPVTRASLAGIKPARLDKGYRRFARRYFTDLALGPTPYDPNELADIDLIISSTRDEMYGHRAGLWFDQRGFGAKLAARLFGLENSDTNIKEAPR

SEQ ID NO: 409 - DNA, 1761 bp, Corynebacterium glutamicum
  CDS (101)..(1738): RXA02092
gcataactgcatattcatcaaagcgttgccggtcacctgcttcgtgcctagcctgggaggcatgaatagttcgacgtggacacctcggtactcaccgcatatggctaacagtgcagcgggttcggtgttggcggatgagatggtggttcccacctcaacagggtttgttaaaggcgtcaaaggaccagggcttaaaacctggaggggaattccctacggccgaaacactggcggaaaatatcgcttccgggcaccccggcccgccaagaaatgggacggcgtgcgcgattgctcaatgttcggtgaagtagcttctcagccaacgtactcctggacagataagattcgcggttcagaagactgccttaacctcgatgtcgtgcggcctgattccgaagaaaagcttcctgttgtggtgtatctccacggcggttccttcatcatgggctcatcaagcgaaaaagcgctgcgcggatataacctcgtcacaaacatgaatgtggtctacgtgtccgttaatttccgcctcggcgctttgggctatctagatctgcgttccgtgggggaggattgcgtagccaaccccgcgctccacgatcagctcctggccctgcagtgggtcagccgtaatatcaaagcattcggtggggatcctgacaacgtcaccctcatgggcgaatccgcgggcgctgcagcagtggttgcactcatgtgtgtgcccgctgcaggaggactattccaccgcgccatcgcccaatccgcgccggtcatctctgtgcactcatctacccaagcaaaattctgggcacgtgaactgatctaccgcatggcattgcccagggaaaccaccttggatgaactgcgccaagaatccgccgatgatctagtgcgcgccgggcagtcgatgatgtggcgctccggcgaactgctccaactcaactcttgttacgggcccacggtggatggttccttgctacctgagcacccgctcaccatgtttgaacagggaagacaacaccgcattcccttcatgatcggtactaataacggagaaacttctttctccaaagccttttatttaagaagctctgcccgacgtcgctctgccttacgcatgctgtctgtgtatgatccccacaatgcagaacgcgtggttagcgcctatggcggaggcgaggcacgcacagacttttctgaactactcgctgacgcgctgttctgggcaccgtcggttagattggcgcagtcgcacgcctcccaagatgaagatacctggatgtaccgcttcgattacgccccacaatccatgcggaaacttggcctcggcgcgattcactctttcgaactcaacgctgtctttggcgatcatgaatcttctcgctccatgaaccttgcgaaaattgccggcggcatggatcatttggataaagtcaccgaacttgtccaagagcattggaagcaattcatctacttcggcaggcccggtgaagagtggaaggcttaccgcggccgcagcgataccgaaccgggccgtgctacatttgtcatcgatatcaactcccgaatcgcgtgggatccacgccaggacaaacgcacggcgtgggaaaattacgacatgctcgaatggggcacaggccgcccagatctagccaacgaacttgatttcatcgagccggaagagacagaagaagagcagcaattgaagtggcttagccttatgcagttttttggaagtagataaatgagcatctggaaacgtct

SEQ ID NO: 410 - protein, 546 aa, Corynebacterium glutamicum
MANSAAGSVLADEMVVPTSTGFVKGVKGPGLKTWRGIPYGRNTGGKYRFRAPRPAKKWDGVRDCSMFGEVASQPTYSWTDKIRGSEDCLNLDVVRPDSEEKLPVVVYLHGGSFIMGSSSEKALRGYNLVTNMNVVYVSVNFRLGALGYLDLRSVGEDCVANPALHDQLLALQWVSRNIKAFGGDPDNVTLMGESAGAAAVVALMCVPAAGGLFHRAIAQSAPVISVHSSTQAKFWARELIYRMALPRETTLDELRQESADDLVRAGQSMMWRSGELLQLNSCYGPTVDGSLLPEHPLTMFEQGRQHRIPFMIGTNNGETSFSKAFYLRSSARRRSALRMLSVYDPHNAERVVSAYGGGEARTDFSELLADALFWAPSVRLAQSHASQDEDTWMYRFDYAPQSMRKLGLGAIHSFELNAVFGDHESSRSMNLAKIAGGMDHLDKVTELVQEHWKQFIYFGRPGEEWKAYRGRSDTEPGRATFVIDINSRIAWDPRQDKRTAWENYDMLEWGTGRPDLANELDFIEPEETEEEQQLKWLSLMQFFGSR

SEQ ID NO: 411 - DNA, 816 bp, Corynebacterium glutamicum
  CDS (101)..(793): RXN00658
cattgacacccacaggtttaccagcatcacggaaagtttggatggatttttactccggccacaacgtctggctggaagctcagccacgtgctttctggtcgtgcgccacgacgagcactacccagctgcggcaaacctcattgctttcgataagggatggtccaccctcatcgcccctcagctggaagatccagaggcggaggagttcaccgccggattcctcaccgaataccaggacaatctgatcactgcgggcatggagcaccaggcgctcgcgagcggcttcccggtggggcgtcgcttcaagtccgatattgctttacgacgctgcgatgcggtgaccacccacatcggccacgaacactccgccgatggtcactggaggatctacgtattcgctggccaagccaccccacaagattccgagtctgcactgaacaagtgggcgcagtggatggaggaaagcgaagactcaccactcaaccgcttcaccccagaagccggcgaccgcaacgcagtcttcgatatcaaggctacctaccagcagcattaccactccttcgacctgttcgatgcgccagaggtcttcttcccacgagttggaccatacaagctgcaaaacctcgaaaacgtttggaccgcactggattcccaagacatctttgagtcccgtggcatcagtcgcgatggcgcaattgttgtcgttcgcccagaccagtacgtcgcagcagtcctcccactcgaagacaccgcagcactggctgagttcttcaatggcaatctgcttgagccataaaccctaaattctaggaacga

SEQ ID NO: 412 - protein, 231 aa, Corynebacterium glutamicum
VRHDEHYPAAANLIAFDKGWSTLIAPQLEDPEAEEFTAGFLTEYQDNLITAGMEHQALASGFPVGRRFKSDIALRRCDAVTTHIGHEHSADGHWRIYVFAGQATPQDSESALNKWAQWMEESEDSPLNRFTPEAGDRNAVFDIKATYQQHYHSFDLFDAPEVFFPRVGPYKLQNLENVWTALDSQDIFESRGISRDGAIVVVRPDQYVAAVLPLEDTAALAEFFNGNLLEP

SEQ ID NO: 413 - DNA, 418 bp, Corynebacterium glutamicum
  CDS (101)..(418): FRXA00658
cattgacacccacaggtttaccagcatcacggaaagtttggatggatttttactccggccacaacgtctggctggaagctcagccacgtgctttctggtcgtgcgccacgacgagcactacccagctgcggcaaacctcattgctttcgataagggatggtccaccctcatcgcccctcagctggaagatccagaggcggaggagttcaccgccggattcctcaccgaataccaggacaatctgatcactgcgggcatggagcaccaggcgctcgcgagcggcttcccggtggggcgtcgcttcaagtccgatattgctttacgacgctgcgatgcggtgaccacccacatcggccacgaacactccgccgatggtcactggaggatctacgtattcgctggccaagccaccccacaa

SEQ ID NO: 414 - protein, 106 aa, Corynebacterium glutamicum
VRHDEHYPAAANLIAFDKGWSTLIAPQLEDPEAEEFTAGFLTEYQDNLITAGMEHQALASGFPVGRRFKSDIALRRCDAVTTHIGHEHSADGHWRIYVFAGQATPQ

SEQ ID NO: 415 - DNA, 2004 bp, Corynebacterium glutamicum
  CDS (101)..(1981): RXA01385
atcacactttcattcgcagtgtgatctgaactacatttctggttactgtacggaacacgctccgtgaatgagataggaaatcccctcgaaaggaccagacatgcagtttcattatgaaggatacgcaaccggtgacccaatggagatgcgcgcggaaggtagcggaatcaaccgcccggacgatctccccgaggtcatggatgttctcatcgttggtgcaggtccggctggcaccatcgcagcggctcagctttcccgattccccaatgtgaccacccgcctcgtagagagaagcgaccgtcgcctcgaactagccaatgcagatggcgtgcactcccgaaccattgaaactttccaggcatttggtttcgcccacgagatcctcgccgaagctcatgaaatcaccgacatggcgttctggaagccggacccgcaaaaccctcgtgagatcattcgcgacaacagcacccgcgagctgccacagcacatcagtgaatttccgatggcgttgctcacccagacccgcatcatcgaccacttcaaccggttcatgaagaactccccaaccaggatgaagcctgactatggatacgagttcgtggactttgaagtagaagaagacgcagaatatccggtaattgtcaccctccgccgcaccagtggcgagcaaactggcgaattggtcaccgtccgaaccaagtacctggtcggtgccgatggtgcacgaagccaagtgcgcaaatcactgggataccgactccaaggtaagcaggctaaccacgcttggggtgtgatggatattcacgcgaacaccgagttccccgacgtgcgcaagaagtgcaccatcaaatctgattcgggtcgcaccatcttgctcatcccacgtgagggtggcttcctcttccgtctctacgttgacctgggcgaagtacctgatgatggcagcaaggctgttcgtgataccccactccaggatgtcatcgacaccgcgaaccagatcatggctccattcaccctcgacgtgaaaaacgttgtgtggaactccatctacgaggtaggccaccgcgtcgcagaccatttcgatgaccgtgtttcagaaaaaacctcgagcgaacacccacgcattttcattgctggcgacgcctgccacacccacagcgctaaggctggccagggcatgaacgtgtccatgcaggacggattcaaccttggctggaagcttggacatgtggccagcggaaatagcccacgcgaactacttcagacctacgctgaagagcgcgaagacattgcctacaagctcatcgagtacgacaagaactggtcaacactcatggcaaagccaagcagcgaaatgggcagtgcccaagaccttgaggatttctaccgcgcgaactctgagttcaatgccggctacatgacccactatcctccttcttccatcacaatggatggcagcaaccaagatctggcaaagggctacccaattggccgacgcttcaagtcagcgatggttggtcgagtctgcgacttcaccgaaacacacctcggtcaccaagcaacagccgacggacgcatgcgcgcatacgtcttcgcaggatccgatgcacttaacggcgagggttctgagctagaccgctgggcagaatgggcagaggcgaaccttgaccccacgcttgtcgacgccaaggtgatttaccaaagcccttataccgagctcgacacccgccaggttccatccgtgttcaaacctgcagtcgggatcttcgaactgaccaatgtggaaaactccttcggtatcaccacggactccgacatctttgatagtcgcgagatctcccgcgatggtgtcgtggtggtagtccgaccagaccaatacgtttccggaatcttcccactcactgatacccaagggcttggcgaattcctcaccggatacttccccaaaatgaaaggcgcacatcagctaatcaacgcgaactaaggcacagctgttaaaacagt

SEQ ID NO: 416 - protein, 627 aa, Corynebacterium glutamicum
MQFHYEGYATGDPMEMRAEGSGINRPDDLPEVMDVLIVGAGPAGTIAAAQLSRFPNVTTRLVERSDRRLELANADGVHSRTIETFQAFGFAHEILAEAHEITDMAFWKPDPQNPREIIRDNSTRELPQHISEFPMALLTQTRIIDHFNRFMKNSPTRMKPDYGYEFVDFEVEEDAEYPVIVTLRRTSGEQTGELVTVRTKYLVGADGARSQVRKSLGYRLQGKQANHAWGVMDIHANTEFPDVRKKCTIKSDSGRTILLIPREGGFLFRLYVDLGEVPDDGSKAVRDTPLQDVIDTANQIMAPFTLDVKNVVWNSIYEVGHRVADHFDDRVSEKTSSEHPRIFIAGDACHTHSAKAGQGMNVSMQDGFNLGWKLGHVASGNSPRELLQTYAEEREDIAYKLIEYDKNWSTLMAKPSSEMGSAQDLEDFYRANSEFNAGYMTHYPPSSITMDGSNQDLAKGYPIGRRFKSAMVGRVCDFTETHLGHQATADGRMRAYVFAGSDALNGEGSELDRWAEWAEANLDPTLVDAKVIYQSPYTELDTRQVPSVFKPAVGIFELTNVENSFGITTDSDIFDSREISRDGVVVVVRPDQYVSGIFPLTDTQGLGEFLTGYFPKMKGAHQLINAN

SEQ ID NO: 417 - DNA, 735 bp, Corynebacterium glutamicum
  CDS (101)..(712): RXN01461
tcgactatgacgagacccgtgaaaacttcgcgcttggttacaagttcgacatcgtccttcgtggccgcaacgccaccccatttgagtaaagggttttgcaatgattgatacagggaagaacggcgagttccgctacgagcagtcgaatatcatcgatcagaacgaagccgagttcggcatcactccttcacagaccgtgggcccttacgtccacatcggtttgacccttgaaggtgcggagcatctcgtggagccaggttcggaaggcgcggtgtcctttactgtttccgcaactgatggcaacggcgaccccatcgcggatgccatgtttgaactgtggcaggccgatccagagggcatccacaactctgatttggatccaaaccgcacagcaccagcaaccgcagatggcttccgcgggcttggtcgcgcgatggcaaacgcgcagggtgaggcaacgttcaccactttggttccgggagcattcgcagatgaggcaccacacttcaaggttggtgtgttcgcccgtggcatgctggagcgtctgtacactcgcgcatacctgccagacgccgatttgagcaccgacccagttttggctgtggtcccagctgatcgacgtgacctcctggtggctcaaaagaccgatgatggattccgcttcgacatcactgtccaggctgaagacaatgaaaccccattttttggactctaaattgacccgatctttatact

SEQ ID NO: 418 - protein, 204 aa, Corynebacterium glutamicum
MIDTGKNGEFRYEQSNIIDQNEAEFGITPSQTVGPYVHIGLTLEGAEHLVEPGSEGAVSFTVSATDGNGDPIADAMFELWQADPEGIHNSDLDPNRTAPATADGFRGLGRAMANAQGEATFTTLVPGAFADEAPHFKVGVFARGMLERLYTRAYLPDADLSTDPVLAVVPADRRDLLVAQKTDDGFRFDITVQAEDNETPFFGL

SEQ ID NO: 419 - DNA, 559 bp, Corynebacterium glutamicum
  CDS (101)..(559): FRXA01461
tcgactatgacgagacccgtgaaaacttcgcgcttggttacaagttcgacatcgtccttcgtggccgcaacgccaccccatttgagtaaagggttttgcaatgattgatacagggaagaacggcgagttccgctacgagcagtcgaatatcatcgatcagaacgaagccgagttcggcatcactccttcacagaccgtgggcccttacgtccacatcggtttgacccttgaaggtgcggagcatctcgtggagccaggttcggaaggcgcggtgtcctttactgtttccgcaactgatggcaacggcgaccccatcgcggatgccatgtttgaactgtggcaggccgatccagagggcatccacaactctgatttggatccaaaccgcacagcaccagcaaccgcagatggcttccgcgggcttggtcgcgcgatggcaaacgcgcagggtgaggcaacgttcaccactttggttccgggagcattcgcagatgaggcaccacacttcaaggttggtgtgttcgcccgtggcatgctggagcgtctgtacactcgcgca

SEQ ID NO: 420 - protein, 153 aa, Corynebacterium glutamicum
MIDTGKNGEFRYEQSNIIDQNEAEFGITPSQTVGPYVHIGLTLEGAEHLVEPGSEGAVSFTVSATDGNGDPIADAMFELWQADPEGIHNSDLDPNRTAPATADGFRGLGRAMANAQGEATFTTLVPGAFADEAPHFKVGVFARGMLERLYTRA

SEQ ID NO: 421 - DNA, 813 bp, Corynebacterium glutamicum
  CDS (101)..(790): RXA01462
ttcgcgcgcgatctgacatgttcgccccgcgaactacttgtcaacggcctcaatcatccctactttgagatctatatcactagacgcagaaaggtctcgcatggacatcccacacttcgccccgacgggaggcgaatactccccactgcacttcccggagtaccggaccaccatcaagcgcaacccaagcaacgatctcatcatggttcctagtcgcctcggcgagtccacgggacctgtcttcggcgaccgcgacttgggagacatcgacaacgacatgaccaaggtgaacggtggcgaggctatcggccagcgcatcttcgttcacggccgtgtcctcggtttcgatggcaagccagttccgcacaccttggtcgaggcgtggcaggcaaacgccgcaggccgttaccgccacaagaatgactcctggccagcgccactggatccacacttcaacggtgttgcacgtactctcaccgacaaggacggccagtaccacttctggaccgttatgccaggtaattacccttggggtaaccaccacaacgcatggcgcccggcgcacattcacttctcgctctatggtcgtcagtttacggagcgtctggtcacccagatgtacttcccgaacgatccattgttcttccaggatccgatctacaacgcggtgccaaagggtgcacgtgagcgcatgatcgcaacgttcgactatgacgagacccgtgaaaacttcgcgcttggttacaagttcgacatcgtccttcgtggccgcaacgccaccccatttgagtaaagggttttgcaatgattgat

SEQ ID NO: 422 - protein, 230 aa, Corynebacterium glutamicum
MDIPHFAPTGGEYSPLHFPEYRTTIKRNPSNDLIMVPSRLGESTGPVFGDRDLGDIDNDMTKVNGGEAIGQRIFVHGRVLGFDGKPVPHTLVEAWQANAAGRYRHKNDSWPAPLDPHFNGVARTLTDKDGQYHFWTVMPGNYPWGNHHNAWRPAHIHFSLYGRQFTERLVTQMYFPNDPLFFQDPIYNAVPKGARERMIATFDYDETRENFALGYKFDIVLRGRNATPFE

SEQ ID NO: 423 - DNA, 1614 bp, Corynebacterium glutamicum
  CDS (101)..(1591): RXN00641
tgcggaattgctcgcaaatgtcacacaccgcttcaaagcaaaaacgaaaacgacatcgcggtggcaataccaacttcttttcactctcttggaggttcacatgtccacaccagtttcaaatttggcaagcgttcagaaaactctggaccatgcgcttgaggaccgccctgaagagggaatcgtccgcgtcaaccgcaacatcttcactgaccctgagatcttcgagctggagatgcgccacatcttcgaaggcatctggatggacatggctcacgagtcccagatccctaacggtggagactacttcaccacctacattggctgccagcggatcatgatcacccgttccaaggaaggcacactcaacggcctgatcaacgcgtgttctcaccgtggcgccatgctctgccgtggcaagagtgacaaccgcacctccttgacctgcccattccacggctggccattctgcaacggcggcgcactgctcaaggtcaagggcgaaaaagaaggcgcctacccagagaatttccgcaccgacggctcccacgatgtgcgtcgcgttcctaagttagagtcctaccgtggcttcctcttcggctccctcaacgatgatgtcgtttctttggaagagcacctcggcgacacccgtaccgtcattgacatgctggttgaccaatccccagaaggcctcgaagtactgcgcggatcctccacctacacctacgacggcaactggaagctccagaccgaaaacggtgcagacggctaccacgtttcctccacccactggaactacgctgcaaccacctcccgccgtggcactggtgaatccgcgaacgaaaccaaggcaatggacgctggtacctggggcaagcagggtggcggatacttctcctacccttacggccacatgctgctgtggatgtggtggggcaacccagaagaccgcccactgttcgagcgccgcgacgagttcaagaaggaattcggcgaagaaaagggcgagttcatggttggtgcttcccgcaatctgtgcctctaccccaatgtttacctgatggatcagttctcctcacagatccgccacatccgcccaatctcagttgatcagaccgaagtcaccatctactgcatcgcacctaagggcgagtccgcggaagcacgtgcaaaccgcatccgccagtacgaagacttcttcaacgcaacgggcatggcaaccccagatgacctggaggaattccgctcctgccagaagacctaccaggcatctgccttcccatggaatgacatgacccgcggtttgggccaccaggtacagggaccaaacgaggttgccaagggcctaggcatgaacgaagttctttcctccggagcacgcaccgaagatgaaggcctctacccaatccagcacggcttctggcatgaactcatgcaggaggctgtgaataagcagagcatcaaggaaaaggaattggctgacgataccgcttcttcccttgccaccgtagctgcagccaaaatccgtgaggaagcaaaggcagccgcgaagtccgacgctggagagcctcgccgccgtcgtcgcacccgcggttagtcgtcgaaaagcaaaaaatc

SEQ ID NO: 424 - protein, 497 aa, Corynebacterium glutamicum
MSTPVSNLASVQKTLDHALEDRPEEGIVRVNRNIFTDPEIFELEMRHIFEGIWMDMAHESQIPNGGDYFTTYIGCQRIMITRSKEGTLNGLINACSHRGAMLCRGKSDNRTSLTCPFHGWPFCNGGALLKVKGEKEGAYPENFRTDGSHDVRRVPKLESYRGFLFGSLNDDVVSLEEHLGDTRTVIDMLVDQSPEGLEVLRGSSTYTYDGNWKLQTENGADGYHVSSTHWNYAATTSRRGTGESANETKAMDAGTWGKQGGGYFSYPYGHMLLWMWWGNPEDRPLFERRDEFKKEFGEEKGEFMVGASRNLCLYPNVYLMDQFSSQIRHIRPISVDQTEVTIYCIAPKGESAEARANRIRQYEDFFNATGMATPDDLEEFRSCQKTYQASAFPWNDMTRGLGHQVQGPNEVAKGLGMNEVLSSGARTEDEGLYPIQHGFWHELMQEAVNKQSIKEKELADDTASSLATVAAAKIREEAKAAAKSDAGEPRRRRRTRG

SEQ ID NO: 425 - DNA, 372 bp, Corynebacterium glutamicum
  CDS (101)..(349): FRXA00640
  misc_feature (350)..(367): n=a,c,g, or t
tgcggaattgctcgcaaatgtcacacaccgcttcaaagcaaaaacgaaaacgacatcgcggtggcaataccaacttcttttcactctcttggaggttcacatgtccacaccagtttcaaatttggcaagcgttcagaaaactctggaccatgcgcttgaggaccgccctgaagagggaatcgtccgcgtcaaccgcaacatcttcactgaccctgagatcttcgagctggagatgcgccacatcttcgaaggcatctggatggacatggctcacgagtcccagatccctaacggtggagactacttcaccacctacattggctgccagcggatcatgatcacccgttccnaggnnggcacactnaanggcct

SEQ ID NO: 426 - protein, 83 aa, Corynebacterium glutamicum
MSTPVSNLASVQKTLDHALEDRPEEGIVRVNRNIFTDPEIFELEMRHIFEGIWMDMAHESQIPNGGDYFTTYIGCQRIMITRS

SEQ ID NO: 427 - DNA, 1164 bp, Corynebacterium glutamicum
  CDS (101)..(1141): FRXA00641
  misc_feature (11)..(97): n=a,c,g, or t
ccacggttgannantcngcaaggncggnncactgctcaaggtcaaggatgaaaaagaaggcncctacccagagtatttccgcaccganggntcccangatgtgcgtcgcgttcctaagttagagtcctaccgtggcttcctcttcggctccctcaacgatgatgtcgtttctttggaagagcacctcggcgacacccgtaccgtcattgacatgctggttgaccaatccccagaaggcctcgaagtactgcgcggatcctccacctacacctacgacggcaactggaagctccagaccgaaaacggtgcagacggctaccacgtttcctccacccactggaactacgctgcaaccacctcccgccgtggcactggtgaatccgcgaacgaaaccaaggcaatggacgctggtacctggggcaagcagggtggcggatacttctcctacccttacggccacatgctgctgtggatgtggtggggcaacccagaagaccgcccactgttcgagcgccgcgacgagttcaagaaggaattcggcgaagaaaagggcgagttcatggttggtgcttcccgcaatctgtgcctctaccccaatgtttacctgatggatcagttctcctcacagatccgccacatccgcccaatctcagttgatcagaccgaagtcaccatctactgcatcgcacctaagggcgagtccgcggaagcacgtgcaaaccgcatccgccagtacgaagacttcttcaacgcaacgggcatggcaaccccagatgacctggaggaattccgctcctgccagaagacctaccaggcatctgccttcccatggaatgacatgacccgcggtttgggccaccaggtacagggaccaaacgaggttgccaagggcctaggcatgaacgaagttctttcctccggagcacgcaccgaagatgaaggcctctacccaatccagcacggcttctggcatgaactcatgcaggaggctgtgaataagcagagcatcaaggaaaaggaattggctgacgataccgcttcttcccttgccaccgtagctgcagccaaaatccgtgaggaagcaaaggcagccgcgaagtccgacgctggagagcctcgccgccgtcgtcgcacccgcggttagtcgtcgaaaagcaaaaaatc

SEQ ID NO: 428 - protein, 347 aa, Corynebacterium glutamicum
VRRVPKLESYRGFLFGSLNDDVVSLEEHLGDTRTVIDMLVDQSPEGLEVLRGSSTYTYDGNWKLQTENGADGYHVSSTHWNYAATTSRRGTGESANETKAMDAGTWGKQGGGYFSYPYGHMLLWMWWGNPEDRPLFERRDEFKKEFGEEKGEFMVGASRNLCLYPNVYLMDQFSSQIRHIRPISVDQTEVTIYCIAPKGESAEARANRIRQYEDFFNATGMATPDDLEEFRSCQKTYQASAFPWNDMTRGLGHQVQGPNEVAKGLGMNEVLSSGARTEDEGLYPIQHGFWHELMQEAVNKQSIKEKELADDTASSLATVAAAKIREEAKAAAKSDAGEPRRRRRTRG

SEQ ID NO: 429 - DNA, 615 bp, Corynebacterium glutamicum
  CDS (101)..(592): RXA00642
aaaggcagccgcgaagtccgacgctggagagcctcgccgccgtcgtcgcacccgcggttagtcgtcgaaaagcaaaaaatcttttaaggagaacacctaaatgtctgaaatcacccgctctgagatcgaagctttcctctactacgaggctcgcctgctcgatgaccgtaaatttgaagaatggctcgaatgctaccgcgaggacgccgagttttggatgccagcctgggacgacaacggtgaactgactgaagatccacagtctgaaatttccctcatctactacccaaaccgtggtggacttgaggaccgcgtcttccgcatccgcaccgaacgctcctctgcaacttccctacctgaaccacgcaccggccacagcaccaccaacgtggaaatcctggagcgccgcgacggcgaagtagatatccgcttcaactggatcaccttctactaccgttacaacaccaccgacacctacttcggcaccacgtttatcacccttgatgtcagtggtgaaaccccgaagatcgtcaagaagaaggtcgttttgaagaacgactacatccaccacatcgtcgatatttaccacgtctaggaggcactcacatgactcac

SEQ ID NO: 430 - protein, 164 aa, Corynebacterium glutamicum
MSEITRSEIEAFLYYEARLLDDRKFEEWLECYREDAEFWMPAWDDNGELTEDPQSEISLIYYPNRGGLEDRVFRIRTERSSATSLPEPRTGHSTTNVEILERRDGEVDIRFNWITFYYRYNTTDTYFGTTFITLDVSGETPKIVKKKVVLKNDYIHHIVDIYHV

SEQ ID NO: 431 - DNA, 1659 bp, Corynebacterium glutamicum
  CDS (101)..(1636): RXA00643
tcagtggtgaaaccccgaagatcgtcaagaagaaggtcgttttgaagaacgactacatccaccacatcgtcgatatttaccacgtctaggaggcactcacatgactcaccaagttgcacttgcctttgaagacggcatcacccgattcatcgactgcgaagatgaccaaactgttgcagatgccgcctaccaggcacgcatcaacattcctttcgactgccgcgacggcgcctgcggaacctgcaaagcgttctgcgaatccggcgactttgacgaaggcgactacatcgacgacgccctgtccgaagatgaagcagccgacggctactgcctgccttgccagatgaccccaaagaccgacctcatcttgcagatcgccaccacctccgtgctggcaaagaccggcgcatccactttcgatggcgagttgaaggagatcaatcacttctctgattccaccatcggcattgagatcgaactggaaaaccgccaagatttggcgttcctccctggtcaatacatgaacatccaggttccaggcagcgaccagactcgttcctactctttctcctgcgctcaagattccggcaacgtgcagttcctgatcaaggtaaccccaggtggactcatgaccacctatctcaccgatcacgcgaaggtcggcgacaagctcaccttgaccggcccgatgggttccttcttcctgcgtgaacctgtccgcccgatcctgctgctcgccggcggaactggacttgcaccgatcttggctattttggaaaagctttcccgcgatgagcttctcgacgtcccaatccgcctggtttacggcgcgaacttcacccacgatctggtggaattggatcgacttgatgccttcaaggacaagttcgacttcgattacatcaccgtgctttccgacaaggacaccgagcatccacgcaagggctacgtcccagcacacctgaccggcgaatatgagccagatgaggacactgatgtgtacctctgcggccctcctccaatggtcgaggccgtgcgccaattcctgggcaccctggagcatcctccgctggacttttattacgagaagttcacttccgccgctgcccctgctgctggtaagccagagatcaccgtggagaccagcgaagttgcagaggatttcaacctggtcgaggtgtccactccaggcatgtcttccggcgaggtgcactcttctgcaacccagctgcaggcccgcatggctctggagctcggcgcgctggagcttgcgatcaacaaactcggcgagcgcgacatcgagcgattccgcaacttggccgacatcgcgaactccttcatcgacggcgataagtttatcgacgcggtgaagttcaccgaggccaacgccgatttccacgagttcctcttccgccgcgcaaacaacgaggcgctgcttgcggcgtaccagaacctccaggttgttcaagaaatgaacgcaacccttccaggcgccgagtggattgatccggcaattgccaccgagcacttggcgcttgtcgacgccgtctcccagaatgatctcgagaccgcgagaacaatcattcgtgaacacgcggagcacggcattgacactatggttaaggccctcgagaaatgagcgcgccagtaggacaaggc

SEQ ID NO: 432 - protein, 512 aa, Corynebacterium glutamicum
MTHQVALAFEDGITRFIDCEDDQTVADAAYQARINIPFDCRDGACGTCKAFCESGDFDEGDYIDDALSEDEAADGYCLPCQMTPKTDLILQIATTSVLAKTGASTFDGELKEINHFSDSTIGIEIELENRQDLAFLPGQYMNIQVPGSDQTRSYSFSCAQDSGNVQFLIKVTPGGLMTTYLTDHAKVGDKLTLTGPMGSFFLREPVRPILLLAGGTGLAPILAILEKLSRDELLDVPIRLVYGANFTHDLVELDRLDAFKDKFDFDYITVLSDKDTEHPRKGYVPAHLTGEYEPDEDTDVYLCGPPPMVEAVRQFLGTLEHPPLDFYYEKFTSAAAPAAGKPEITVETSEVAEDFNLVEVSTPGMSSGEVHSSATQLQARMALELGALELAINKLGERDIERFRNLADIANSFIDGDKFIDAVKFTEANADFHEFLFRRANNEALLAAYQNLQVVQEMNATLPGAEWIDPAIATEHLALVDAVSQNDLETARTIIREHAEHGIDTMVKALEK

SEQ ID NO: 433 - DNA, 1166 bp, Corynebacterium glutamicum
  CDS (16)..(1143): RXN01993
ctttaggagttcaccatgacactgtccgaacgcaagctcaccaccaccgccaagattcttccccacccactcaacgcctggtacgtcgccgcttgggattatgaagtcacatctaaaaagcccatggccaggacaatcgccaacaaaccactcgctttgtaccgcaccaaagatggccgagccgttgcccttgcagacgcctgctggcaccgcctcgcaccgctatccaagggaaaactcgtgggcacagacggaatccaatgcccttatcacggcttggagtacaactccgcgggccgctgcatgaaaatgcccgcgcaggaaaccctcaacccgtcagcagccgtcaactcctaccccgtggtggaagcccaccgctttgtgtgggtgtggctgggcgatcccacattggcagatcccacccaagtacccgatatgcaccagatgagccaccccgaatgggcaggcgatggacgcaccatctccgctgactgcaactaccaattagtgctggacaacttgatggacctcacccacgaagagttcgtgcactcctccagcatcggacaagacgaacttagtgaatcagagttcgtggtcacccacactgaagattccgtgacggtcacccgctggatgcatgacatagatgcaccaccgttttggcaaaagaacatgaatgataagttcccaggatttgaaggcaaggtggatcgttggcagatcatccactactactacccttccaccatctgcattgatgttggtgtagcaaaggctggaactggcgcgcaggaaggcgaccgcagccagggcgttaatgggtatgtcatgaacaccattaccccagattcagatcgttcctctcattacttctgggcattcatgcgcaactaccgcctggaaagccaaaccatcaccacccagctgcgcgacggtgtatccggtgtattcaaagaagacgaagacatgctgaccgctcagcaagatgccatcgacgccaacaccgactacgagttttacagcctcaacattgatgccggtggcatgtgggtgcgccgaatcctcgaggaagcactctccaaggaaggccgactggatatccccaccacattcccccgcgcaacaccgaagccggaggcataaaccatgaactcgcaatggca

SEQ ID NO: 434 - protein, 376 aa, Corynebacterium glutamicum
MTLSERKLTTTAKILPHPLNAWYVAAWDYEVTSKKPMARTIANKPLALYRTKDGRAVALADACWHRLAPLSKGKLVGTDGIQCPYHGLEYNSAGRCMKMPAQETLNPSAAVNSYPVVEAHRFVWVWLGDPTLADPTQVPDMHQMSHPEWAGDGRTISADCNYQLVLDNLMDLTHEEFVHSSSIGQDELSESEFVVTHTEDSVTVTRWMHDIDAPPFWQKNMNDKFPGFEGKVDRWQIIHYYYPSTICIDVGVAKAGTGAQEGDRSQGVNGYVMNTITPDSDRSSHYFWAFMRNYRLESQTITTQLRDGVSGVFKEDEDMLTAQQDAIDANTDYEFYSLNIDAGGMWVRRILEEALSKEGRLDIPTTFPRATPKPEA

SEQ ID NO: 435 - DNA, 389 bp, Corynebacterium glutamicum
  CDS (1)..(366): FRXA01993
gctggaactggcgcgcaggatggcgaccgcagccagggcgttaatgggtatgtcatgaacaccattaccccagattcagatcgtttttctcattacttctgggcattcatgcgcaactaccgcctggaaagccaaaccatcaccacccagctgcgcgacggtgtatccggtgtattcaaagaagacgaagacatgctgaccgctcagcaagatgccatcgacgccaacaccgactacgagttttacagcctcaacattgatgccggtggcatgtgggtgcgccgaatcctcgaggaagcactctccaaggaaggccgactggatatccccaccacattcccccgcgcaacaccgaagccggaggcataaaccatgaactcgcaatggca

SEQ ID NO: 436 - protein, 122 aa, Corynebacterium glutamicum
AGTGAQDGDRSQGVNGYVMNTITPDSDRFSHYFWAFMRNYRLESQTITTQLRDGVSGVFKEDEDMLTAQQDAIDANTDYEFYSLNIDAGGMWVRRILEEALSKEGRLDIPTTFPRATPKPEA

SEQ ID NO: 437 - DNA, 669 bp, Corynebacterium glutamicum
  CDS (1)..(669): FRXA02012
ttcaccatgacactgtccgaacgcaagctcaccaccaccgccaagattcttccccacccactcaacgcctggtacgtcgccgcttgggattatgaagtcacatctaaaaagcccatggccaggacaatcgccaacaaaccactcgctttgtaccgcaccaaagatggccgagccgttgcccttgcagacgcctgctggcaccgcctcgcaccgctatccaagggaaaactcgtgggcacagacggaatccaatgcccttatcacggcttggagtacaactccgcgggccgctgcatgaaaatgcccgcgcaggaaaccctcaacccgtcagcagccgtcaactcctaccccgtggtggaagcccaccgctttgtgtgggtgtggctgggcgatcccacattggcagatcccacccaagtacccgatatgcaccagatgagccaccccgaatgggcaggcgatggacgcaccatctccgctgactgcaactaccaattagtgctggacaacttgatggacctcacccaccaagagttcgtgcactcctccagcatcggacaagacgaacttagtgaatcagagttcgtggtcacccacactgaagattccgtgacggtcacccgctggatgcatgacatagatgcaccaccgttttggcaaaagaacatg

SEQ ID NO: 438 - protein, 223 aa, Corynebacterium glutamicum
FTMTLSERKLTTTAKILPHPLNAWYVAAWDYEVTSKKPMARTIANKPLALYRTKDGRAVALADACWHRLAPLSKGKLVGTDGIQCPYHGLEYNSAGRCMKMPAQETLNPSAAVNSYPVVEAHRFVWVWLGDPTLADPTQVPDMHQMSHPEWAGDGRTISADCNYQLVLDNLMDLTHQEFVHSSSIGQDELSESEFVVTHTEDSVTVTRWMHDIDAPPFWQKNM

SEQ ID NO: 439 - DNA, 1098 bp, Corynebacterium glutamicum
  CDS (101)..(1075): RXA01994
gtgggtgcgccgaatcctcgaggaagcactctccaaggaaggccgactggatatccccaccacattcccccgcgcaacaccgaagccggaggcataaaccatgaactcgcaatggcaagatgcacatgttgtttccagcgaaatcatcgctgcagacattcggcgaatagaactatccccgaaatttgcgattccagtaaaacccggcgaacatctcaagatcatggtgcccctaaaaactggacaggaaaagagatcgtactccatcgttgacgctcgtcacgacggttcgactctcgccctgagcgtactcaaaaccagaaactcccgtggaggatctgagttcatgcatacgcttcgagctggagacacagttactgtctccaggccgtctcaggattttcctctccgcgtgggtgcgcctgagtatgtacttgttgccggcggaattggaatcacagcgatccgttcaatggcatctttattaaagaaattgggagcgaactaccgcatccatttcgcagcacgcagccttgatgccatggcttacaaagatgagctcgtggcagaacacggcgacaagctgcacctgcatctagattctgaaggcaccaccatcgatgtcccagcattgatcgaaaccttaaacccccacactgagctttatatgtgcggccccatccgcttgatggatgccatccggcgcgcatggaacacccgcggacttgaccccaccaatctgcgtttcgaaacgtttggaaacagtggatggttctccccagaggttttccacatccaagtaccagagctggggcttcacgccacagtcaacaaggatgaaagcatgctggaggctttgcaaaaggctggggcgaatatgatgtttgattgtcgaaaaggcgaatgtggtttgtgccaggttcgcgttctagaagtcgatggccaggttgatcaccgcgatgtgttcttctctgatcgtcaaaaagaatccgacgcaaaggcatgcgcctgcgtgtctcgagtagtctcctccccttcctcgtccccaacctcgaccattacggtcgccctctcctaaaggagcctggcatggatatc

SEQ ID NO: 440 - protein, 325 aa, Corynebacterium glutamicum
MNSQWQDAHVVSSEIIAADIRRIELSPKFAIPVKPGEHLKIMVPLKTGQEKRSYSIVDARHDGSTLALSVLKTRNSRGGSEFMHTLRAGDTVTVSRPSQDFPLRVGAPEYVLVAGGIGITAIRSMASLLKKLGANYRIHFAARSLDAMAYKDELVAEHGDKLHLHLDSEGTTIDVPALIETLNPHTELYMCGPIRLMDAIRRAWNTRGLDPTNLRFETFGNSGWFSPEVFHIQVPELGLHATVNKDESMLEALQKAGANMMFDCRKGECGLCQVRVLEVDGQVDHRDVFFSDRQKESDAKACACVSRVVSSPSSSPTSTITVALS

SEQ ID NO: 441 - DNA, 1278 bp, Corynebacterium glutamicum
  CDS (101)..(1255): RXA02535
aggattgggtgaggagggaggcgtcgaaaagcaagaaacgcctgacacgcgtagccgtggctgcgcaccttttaccttgattaggtgcacaatagggagtgtgacacctcgccctgtttcttctgttgcgcgactcgttgaggataacgcgcaagattttcttcgcgccgttcaggcgaaacttttaacgctcgcgccacaggctcgtgggcattttcccactgcggatgatgcgactcatatcagcatcgccgaaatggtgagtgcgctgttggaaggcactggtgaggaagggaaagtagacgacaaaacactggagttctttaaagaagcggcgttagatgcgcgtcgatttggcctgaccccagaaatgcacagcgctttgggtgaggccgtgcgcagcgaactattgtcattatgcgaggatcttccctttgaaaatgtgctgtttgccgagcgtgcgattgctgcaaccacggctgtttccgtcgaggcggttcgtgaagctgatgaggcacacattcctgcctcatatcaggcagaaattgtagaagttgaaaagcgcagccgtaggttcaccgtcgtgcgcatgcaagctgaaacgcaactgccctacctaccgggacaatatcttgcagcaactgcggattttctgcccaacacatggcgctacctgtgcccttcgatccccactaacgaatgggggcaggtggagtttcacatccaatcagacgcagatgatatcgctggacttttagccaccacacgccttggcgataaatggcgacttggccccggtcgtggagatttcggacaaagcaaaattagttccggcaatgatttgttatttattgcacatggaacgggcctagctcctcttcgcgcttacatgtttgagctgatgaaccaagcagcacctccacgtttgcactttttcgtcggtgccgactaccccggtgagctgtatgaactcaccggcatgtggaattttgctgcagccagcccatggctttctgtcgtaccggtgtcaacgcatgacaaggatgcgtggtgggttcaagccaccgaagcatcgcagccaccgaggggtttgcatttgcatcaaacgggttcgatggcgaagatcgtcaccgaagcaggtgcttgggccgaccgcgacgtgttaattgctggccctgaatcgtgggctcgggatgttcggcgcgcgatgattaggcgtggaactccggcccagcagattgagattttagggttctaggttgcctcaccgggctgacc

SEQ ID NO: 442 - protein, 385 aa, Corynebacterium glutamicum
VTPRPVSSVARLVEDNAQDFLRAVQAKLLTLAPQARGHFPTADDATHISIAEMVSALLEGTGEEGKVDDKTLEFFKEAALDARRFGLTPEMHSALGEAVRSELLSLCEDLPFENVLFAERAIAATTAVSVEAVREADEAHIPASYQAEIVEVEKRSRRFTVVRMQAETQLPYLPGQYLAATADFLPNTWRYLCPSIPTNEWGQVEFHIQSDADDIAGLLATTRLGDKWRLGPGRGDFGQSKISSGNDLLFIAHGTGLAPLRAYMFELMNQAAPPRLHFFVGADYPGELYELTGMWNFAAASPWLSVVPVSTHDKDAWWVQATEASQPPRGLHLHQTGSMAKIVTEAGAWADRDVLIAGPESWARDVRRAMIRRGTPAQQIEILGF

SEQ ID NO: 443 - DNA, 1248 bp, Corynebacterium glutamicum
  CDS (101)..(1225): RXA00964
ttcaagggctagacgtatgcaggtgttggggattgcttatctcaagggcaatcacacccttcatacgcatctacaacatccgtaaaggaggactccaacaatgggcgccccaggtaaaaacgattacgcaactgaacacgtcaagcaagaagtcccacccgcaactccagaagagcaggcagagctggacaccatgtataaacgcatggatgacctgcatctaaagcccctgtggactcaaatcggtgggttgatgccaaaccacccggaaccacgagctgtggcacacaagtgggattgggcggaactcctgaagctcgcgcagcgctccggtgaactcgttccagttgggcgcggtggcgaacgccgtgccattggcctggcaaacccaggtttagacggcaatacctacatctcccctaccctgtgggcagcaattcagtacctcgctccgggtgagaacgctccagagcaccgccactcacaaaacgcattccgctttgttatcgaaggcgaaggcgtgtggactgtcgttaacggcgatccagtaccaatgcgacgcggcgacttcctgctcaccccaggctggaactaccacggccaccacaacatcgcgaccgagccaatggcctggctagacgggctcgatatcccatttgcctaccaaatggacaccggattctttgagtacggcaccgaaaaactcactgacgaatccaccccagacctctcccgttcagaacgcctgtgggcccacccaggacttcgcccagtctccttcccaggaaaaacttcctactcaccaattgggcgctacgcctgggagcacaccgacgcagcactcaacgatcagctggcattggaagaagcaggacacccaggaacagtcgcgccgggacatgctgcgattcgcttctccaacccaactaccggtggcgatgtcatgaccaccatccgcgcggagttccaccgcctgcgcccaggtgcatccactgcccccattcatgaggtaggaaaccgttgcttccaggtatttgagggttccgcaacaatcaatgttggagataaaacctttgaagctaaccacggcgatgtgatcaatgtaccgtcgtggcagaagtggaatatcgtcgctggctctgacggcgtcgacttgttctgcttctctgatacaccaattttcgaggcccttaacctcgcacgtacttttactccggaaggaatctagaacttatgcgtcttgcaaca

SEQ ID NO: 444 - protein, 375 aa, Corynebacterium glutamicum
MGAPGKNDYATEHVKQEVPPATPEEQAELDTMYKRMDDLHLKPLWTQIGGLMPNHPEPRAVAHKWDWAELLKLAQRSGELVPVGRGGERRAIGLANPGLDGNTYISPTLWAAIQYLAPGENAPEHRHSQNAFRFVIEGEGVWTVVNGDPVPMRRGDFLLTPGWNYHGHHNIATEPMAWLDGLDIPFAYQMDTGFFEYGTEKLTDESTPDLSRSERLWAHPGLRPVSFPGKTSYSPIGRYAWEHTDAALNDQLALEEAGHPGTVAPGHAAIRFSNPTTGGDVMTTIRAEFHRLRPGASTAPIHEVGNRCFQVFEGSATINVGDKTFEANHGDVINVPSWQKWNIVAGSDGVDLFCFSDTPIFEALNLARTFTPEGI

SEQ ID NO: 445 - DNA, 1083 bp, Corynebacterium glutamicum
  CDS (101)..(1060): RXN01466
aatccatgatcccaaactacctcaaagcgcttgtaggctaagacttatggatacacaacgcggctcattgcggggaaaagctcataaagcaaggctaaagatgacgccaaatggtcgcaggcaactcctcctggagcgtggcgcagcatttagcaaaaaccgtaccccgggtctaaaacacgtcgaccgccacaccatcgtggactccgacggcctcagcatccacacgtacatggttggccatgccgaaaatgccacggcaacggtcgtgttcatccacggcttcaccctcgccgccgaagtgtattacatgcaggtcgactacctacaaaccttttacccaaatattaaaagcgtgcttatcgacgcccgcggccacggcgccaccggccagatccgcccagagctctgcaccatcgaaggaacagcgaacgatgttctcgcagccatccacgaacacgcaccgaccggcccgctcattttggttgggcattccctcggcggactcacggcacttaacctggttaaacgggcagatcactcacttcggaagaggatcgtcggcatggttctagtcgccacatcgatcgaatcattatccacccaaggtctaccacaagtcctggcatcaccccttgccgacaacatcaaaaacgccgtcgaagcagcccccaacgatgcccaaaaattccgccaatacgccaccacatttctagcccccaccctggccaccgcagtcttccaacgagacacaaacgatgaagtcatcgatttccacgccgccatgatccacgaaacccccttggataccttcgtcggtttcttcgacgacctccaagaacacgacgaactcgatgccgcaccagcattggaaggcctcaaaggctacgtccttgccggcgaattagatgatgtcaccccaattagccaagccgaccgcatctgcgaagtctggcccggcgcacgccttcaaatcgcagaaggagcaggtcatatgcttccgcttgaagcgccaggaatcctcaataatgcgatcggcaacattttggacgggctgggctgaggaacctggttcgggcgtgg

SEQ ID NO: 446 - protein, 320 aa, Corynebacterium glutamicum
MTPNGRRQLLLERGAAFSKNRTPGLKHVDRHTIVDSDGLSIHTYMVGHAENATATVVFIHGFTLAAEVYYMQVDYLQTFYPNIKSVLIDARGHGATGQIRPELCTIEGTANDVLAAIHEHAPTGPLILVGHSLGGLTALNLVKRADHSLRKRIVGMVLVATSIESLSTQGLPQVLASPLADNIKNAVEAAPNDAQKFRQYATTFLAPTLATAVFQRDTNDEVIDFHAAMIHETPLDTFVGFFDDLQEHDELDAAPALEGLKGYVLAGELDDVTPISQADRICEVWPGARLQIAEGAGHMLPLEAPGILNNAIGNILDGLG

SEQ ID NO: 447 - DNA, 922 bp, Corynebacterium glutamicum
  CDS (101)..(922): FRXA01466
aatccatgatcccaaactacctcaaagcgcttgtaggctaagacttatggatacacaacgcggctcattgcggggaaaagctcataaagcaaggctaaagatgacgccaaatggtcgcaggcaactcctcctggagcgtggcgcagcatttagcaaaaaccgtaccccgggtctaaaacacgtcgaccgccacaccatcgtggactccgacggcctcagcatccacacgtacatggttggccatgccgaaaatgccacggcaacggtcgtgttcatccacggcttcaccctcgccgccgaagtgtattacatgcaggtcgactacctacaaaccttttacccaaatattaaaagcgtgcttatcgacgcccgcggccacggcgccaccggccagatccgcccagagctctgcaccatcgaaggaacagcgaacgatgttctcgcagccatccacgaacacgcaccgaccggcccgctcattttggttgggcattccctcggcggactcacggcacttaacctggttaaacgggcagatcactcacttcggaagaggatcgtcggcatggttctagtcgccacatcgatcgaatcattatccacccaaggtctaccacaagtcctggcatcaccccttgccgacaacatcaaaaacgccgtcgaagcagcccccaacgatgcccaaaaattccgccaatacgccaccacatttctagcccccaccctggccaccgcagtcttccaacgagacacaaacgatgaagtcatcgatttccacgccgccatgatccacgaaacccccttggataccttcgtcggtttcttcgacgaccttcaagaacacgacgaactcgatgccgcaccaacattggaaggcctcaaaggctacgtccttgccggcgaattagatgatgtcacccca

SEQ ID NO: 448 - protein, 274 aa, Corynebacterium glutamicum
MTPNGRRQLLLERGAAFSKNRTPGLKHVDRHTIVDSDGLSIHTYMVGHAENATATVVFIHGFTLAAEVYYMQVDYLQTFYPNIKSVLIDARGHGATGQIRPELCTIEGTANDVLAAIHEHAPTGPLILVGHSLGGLTALNLVKRADHSLRKRIVGMVLVATSIESLSTQGLPQVLASPLADNIKNAVEAAPNDAQKFRQYATTFLAPTLATAVFQRDTNDEVIDFHAAMIHETPLDTFVGFFDDLQEHDELDAAPTLEGLKGYVLAGELDDVTP

SEQ ID NO: 449 - DNA, 766 bp, Corynebacterium glutamicum
  CDS (101)..(766): RXN03036
tagaaaaatctacccagtaagcattcaggaaccattcagaatcttttcttagcatgtctctatcagcgtaaacgtccgaacatgaaaggctagaaaagccatggctgagcagttgcgtcaatttgaaggcagggtcctccctaatcaatccgaggacttggaagatcagggtttgggatttgacctgggaaccgttttctcccgcaggaaggttttgggattcatcggtgttggtggagcaggtgtggcacttgctgcttgttcaccttctggttcttccgcggcatcgagcacctcaagcgcgtccagcagcgcagctgcaaccaccagtgcagcagcagagactttgactgagatgaagtcggagactgctggtccgtacccgggcgatggttcgaatggtccggatgtgttggaggtctccggtgtggagcgccaggacatcaccaagtcgattgattctgacaccgtggcagagggcgtacctctgacgttgactatgaccattttggacatgaacaacaacaatcagccaatggagggtgctgcggtgtacgtgtggcactgtgatgcgccgggtcgatattcgatgtacgactctgagctggaagatgagacctatttacgcggtgtgcagattaccgataagtatggccaggtcacgttcgataccattttccctggttgttatgcgggccgttgggtgcatattcatttcgaggtgttcccggatcgagacagcatcacggattccacgaacaacatt

SEQ ID NO: 450 - protein, 222 aa, Corynebacterium glutamicum
MAEQLRQFEGRVLPNQSEDLEDQGLGFDLGTVFSRRKVLGFIGVGGAGVALAACSPSGSSAASSTSSASSSAAATTSAAAETLTEMKSETAGPYPGDGSNGPDVLEVSGVERQDITKSIDSDTVAEGVPLTLTMTILDMNNNNQPMEGAAVYVWHCDAPGRYSMYDSELEDETYLRGVQITDKYGQVTFDTIFPGCYAGRWVHIHFEVFPDRDSITDSTNNI

SEQ ID NO: 451 - DNA, 766 bp, Corynebacterium glutamicum; identical to SEQ ID NO: 449
  CDS (101)..(766): FRXA02895

SEQ ID NO: 452 - protein, 222 aa, Corynebacterium glutamicum; identical to SEQ ID NO: 450

SEQ ID NO: 453 - DNA, 1026 bp, Corynebacterium glutamicum
  CDS (101)..(1003): RXA02449
acctcagcagattgctcgaagcagcactcaacggtgaggatccggcagttcttagcgcagtactcagtaactaacccggcgatttttcaaggagaaaatcatgacaaccaccaccgcagaccacaacatcagcgcgcagcaaaaggctgttgaagaaaatctggtgaaccgtgtcctccaatcttttgatgcgtgtgaaaacccgcgcctcaagcagctgatggaatcgctggttgtgcatctgcacgatttcatccgggatgtgcgcctcaccgaggatgagtggaattacgccattgatttcctcacagcggttggccacattactgatgacaagcgccaagagtttgtgttgctttccgataccttgggcgcctcgatgcagaccatcgcggtgaacaacgaagcgtatgaaaactcaacggaagctacagtctttggtccattcttcctcgatgacgctcctgaggttgagctgggtggagatatcgccggcggcgcccaggggcaggcagcgtggattgaaggaaccgtcaccgacactgaaggcaatcccgttccgaatgctcgtatcgaggtgtgggagtgcgatgaagatggactctacgatgtccaatatgccgatgagcgcatggcgggtcgcgcgtatatgcacaccgacgccaatggcgattaccgcttctggggtctgactccggttccttatccaatcccccacgatggccccgtgggcaacatgctcaaggcggttggtcgttcgccggtgcgctgcgcccaccttcacttcatggtgaccgctcctgaattgcgcaccttggtcactcacattttcgttgagggtgatccgcagctagaaatcggcgattccgtcttcggggtcaaggactcgttgatcaagaagtttgaggagcaggcgccaggcactcctaccccagatggtcgggatctcggcgatcagacgtgggcgcgcacgcgcttcgacatcgtgctcgcgccgggcgcgtaggatttcgcttttcgacgcaa

SEQ ID NO: 454 - protein, 301 aa, Corynebacterium glutamicum
MTTTTADHNISAQQKAVEENLVNRVLQSFDACENPRLKQLMESLVVHLHDFIRDVRLTEDEWNYAIDFLTAVGHITDDKRQEFVLLSDTLGASMQTIAVNNEAYENSTEATVFGPFFLDDAPEVELGGDIAGGAQGQAAWIEGTVTDTEGNPVPNARIEVWECDEDGLYDVQYADERMAGRAYMHTDANGDYRFWGLTPVPYPIPHDGPVGNMLKAVGRSPVRCAHLHFMVTAPELRTLVTHIFVEGDPQLEIGDSVFGVKDSLIKKFEEQAPGTPTPDGRDLGDQTWARTRFDIVLAPGA

SEQ ID NO: 455 - DNA, 1008 bp, Corynebacterium glutamicum
  CDS (101)..(985): RXN00178
gcgaataatccacggacggtcacagaagaaaacctcactgcgctgcttaccacagcgctcaacggcgacgatccagcaactttgaattaaggagaccaacatgactatttcagcacaacagcaagcagtggaagaagaccttgtagagcgcgtactcgcatcttttgattcgtgtgaaaaccctcgcctcaaactagtgatgaaatccctgactgtgcatctccatgatttcatccgcgatgttcgactcactgaagaagagtggaactacgccattgatttcctcaccaaggttgggcatatcaccgacgataagcgccaagaattcgtgttgctctctgacaccttgggtgcatccatgcagaccatcgctgttaataacgaagcatatgaagacgctaccgaagcaacagtctttggccccttctttgtcgatgatgcgccactggtccaaaacggagatgacattgcctttggcgcagtcggccagccggcatgggtggagggaacggtcaaagacactgaaggaaaccccattcccaatgcacgcattgaagtatgggaatgcgatgaagatggactttatgatgtgcaatacgccgatgagcgcagtgctggacgcgcacacctgtattcagatgaaaacggcgaataccacttctggggactaactcccgtgccatatcccatcccacacgatggtccagtaggacaaatgctccaagcagttggtcgttcccccgttcgttgcgcgcacctacacttcatggtgactgcgccagagaagcgaaccttggtaacccatatcttcgttgagggcgatccgcagctagagatcggcgattccgtgtttggcgtgaaggactcactgattaagaaattcgttgagcaacctgcaggaaccgcaactccagatggtcgcgatgtgggtgatcaaacctgggcacgcacacgttttgatattgtgctcgcccccggcaatgtctaagtagaagcagcaaaaaacca

SEQ ID NO: 456 - protein, 295 aa, Corynebacterium glutamicum
MTISAQQQAVEEDLVERVLASFDSCENPRLKLVMKSLTVHLHDFIRDVRLTEEEWNYAIDFLTKVGHITDDKRQEFVLLSDTLGASMQTIAVNNEAYEDATEATVFGPFFVDDAPLVQNGDDIAFGAVGQPAWVEGTVKDTEGNPIPNARIEVWECDEDGLYDVQYADERSAGRAHLYSDENGEYHFWGLTPVPYPIPHDGPVGQMLQAVGRSPVRCAHLHFMVTAPEKRTLVTHIFVEGDPQLEIGDSVFGVKDSLIKKFVEQPAGTATPDGRDVGDQTWARTRFDIVLAPGNV

SEQ ID NO: 457 - DNA, 1008 bp, Corynebacterium glutamicum; identical to SEQ ID NO: 455
  CDS (101)..(985): FRXA00178

SEQ ID NO: 458 - protein, 295 aa, Corynebacterium glutamicum; identical to SEQ ID NO: 456

SEQ ID NO: 459 - DNA, 1407 bp, Corynebacterium glutamicum
  CDS (101)..(1384): RXA02111
gcttgcgggaacaccgcaccgcccacccaaactgttcagattccaaagataaattctgacgctcattccagcccaccgtttagaagaaaagaccccaatcatgaccacctcaatcaccccatctgtcaaccttgcattgaaaaatgccaatagctgcaacagtgaactcaaagacggaccctggttcctcgaccagcccggaatgccggatgtctacggccccggcgcgtcacaaaacgatccgatccctgcgcatgctccgcgccagcaggttctccccgaggagtaccagcgcgcaagtgatgacgaactgcatcgtaggatccgggaagcgaaagacaccctgggtgacaaagtggttatcctaggacacttctaccagcgcgatgaagttatccaacacgcagattttgttggtgactctttccaacttgcccgcgctgccaaaacccgacccgaggcggaagcgattgtgttctgcggtgtgcacttcatggctgaaaccgctgatctgttatccacggatgaacaatcagtgatcctccccaaccttgccgcaggttgctccatggcagacatggctgaccttgattccgtcgaagactgctgggagcaactcacctcaatttatggcgatgacaccctgatccctgtgacctacatgaattcctctgcagcgctcaaaggtttcgtgggtgagcacggcggaattgtatgcacctcctcaaatgcacgttccgtattggagtgggcgtttgaacgcggccaacgagtcctgttcttccccgatcagcacttgggtcgaaacaccgcgaaagccatgggcattgggatcgatcaaatgcccctgtggaatcccaacaaaccactgggtggcaacaccgtttccgagctagaaaacgcaaaggtactgctctggcatggtttctgctctgtacacaagcgctttactgtcgagcagatcaacaaagcccgcgccgagtaccccgacgttcacgtcatcgtgcaccctgaatcccccatgccagttgttgacgccgccgactcatccggatccactgacttcattgtgaaagccattcaagcagcaccggcaggatctacctttgcgatcggcaccgaaatcaacttggttcagcgcctggcagcccagtacccgcagcacaccatcttctgcctcgaccctgtcatctgcccatgctccaccatgtatcgcattcaccctggttacctggcctgggcacttgaggagttggtggctggaaacgtgattaaccagatttctgtctctgaatccgtggcggcaccggcgcgagtcgctttggaaaggatgctatctgttgttccagcagctcctgttactcctagctcctcgaaggatgcgtaatttatgactacccatattga

SEQ ID NO: 460 - protein, 428 aa, Corynebacterium glutamicum
MTTSITPSVNLALKNANSCNSELKDGPWFLDQPGMPDVYGPGASQNDPIPAHAPRQQVLPEEYQRASDDELHRRIREAKDTLGDKVVILGHFYQRDEVIQHADFVGDSFQLARAAKTRPEAEAIVFCGVHFMAETADLLSTDEQSVILPNLAAGCSMADMADLDSVEDCWEQLTSIYGDDTLIPVTYMNSSAALKGFVGEHGGIVCTSSNARSVLEWAFERGQRVLFFPDQHLGRNTAKAMGIGIDQMPLWNPNKPLGGNTVSELENAKVLLWHGFCSVHKRFTVEQINKARAEYPDVHVIVHPESPMPVVDAADSSGSTDFIVKAIQAAPAGSTFAIGTEINLVQRLAAQYPQHTIFCLDPVICPCSTMYRIHPGYLAWALEELVAGNVINQISVSESVAAPARVALERMLSVVPAAPVTPSSSKDA

SEQ ID NO: 461 - DNA, 951 bp, Corynebacterium glutamicum
  CDS (101)..(928): RXA00644
ttgtcgacgccgtctcccagaatgatctcgagaccgcgagaacaatcattcgtgaacacgcggagcacggcattgacactatggttaaggccctcgagaaatgagcgcgccagtaggacaaggcatcgaaggtcgccccactcacgtcaccccggaacgcttctttggccagggtgttgtggttaccggagcggctcaaggcatcggcatggcagtggcacaccgcatcgcatatgaggatggcaacctagtgttggtggaccgttccccgctggtgcatgaagttgccgaagagctgcgtaaagcaggcgccggaacggtggattctttcatcgccgatctggaaacctttgaaggcgcaactgatgctttggaatttgccgggcagaagttgaagaaccttgatgtggtgatcaacaacgttggtggcaccatctgggcgaagccttatcaggaatactctgaggaagagatccgcaaggaaatcaaccgaagcctcttccccaccttgtggatgtgccgggccgcgttgccaattctgatcggaaatggtggtggaacgatcgttaatgtgtcctccatcgcgaccggtggtatcaaccgtgttccttatgctgcagcaaagggtggcgtcaacggcattgtttctgccatggcccgcgaagctgcaccgcataatgtgcgcgtggtggcaacggctcccggtggcacgctcgctccggaacgtgccgtcaaacgaggccctgggccagagggcgaattggaagaaaagtggtatcagcaaatcgttgatcaaaccattgattccagtttgatgaagcgctacggcaccctagaggagcaggtcgcgccgatctgtttcctcgcttctgaggaagcttcctacatcactggatcagtcatgccagtcggtggaggcgaccagggataacccttggtcaatcttaggga

SEQ ID NO: 462 - protein, 276 aa, Corynebacterium glutamicum
MSAPVGQGIEGRPTHVTPERFFGQGVVVTGAAQGIGMAVAHRIAYEDGNLVLVDRSPLVHEVAEELRKAGAGTVDSFIADLETFEGATDALEFAGQKLKNLDVVINNVGGTIWAKPYQEYSEEEIRKEINRSLFPTLWMCRAALPILIGNGGGTIVNVSSIATGGINRVPYAAAKGGVNGIVSAMAREAAPHNVRVVATAPGGTLAPERAVKRGPGPEGELEEKWYQQIVDQTIDSSLMKRYGTLEEQVAPICFLASEEASYITGSVMPVGGGDQG

SEQ ID NO: 463 - DNA, 1191 bp, Corynebacterium glutamicum
  CDS (101)..(1168): RXN00177
ctattccacagcagtggacgctgaacaacttcaaacacagattaagcagctatcggatctacttcacctcaactcagttgtcggagcataggagctaaaaatgtctttacagttcgatcatgaaaccctcggtcaacgagttctgttcggttcaggtgaggcggcgcaaaatctcgccgctgaaattagccgactcgatgccaaaaacgtcatggtggttgccggtgatttcgagcttcccatggcacggcaagtagcagcagatattgatgtcaaggtgtggcattcaaatgtcgtgatgcatgtgcccatcgaaacagcagaagaagcacgcagtgttgcgaaagaaaacgacattgatgttgtggtgtgtgtgggcggtggatccacaacaggtctagctaaagcgattgccatgaccaccgcattgccgatcattgcggtacccactacttatgcaggttctgaagcaacaaatgtgtggggattgaccgaagccgcgcgcaaaacaactggtgttgataacaaagtgctgccagtgacagttatctacgattcagcgttaaccatgtctttgccggtagaaatgtcggttgcttctggtctcaatggtttggctcactgcattgattctttgtggggaccgaaggcggatcccatcaatgcggctatggctgctgagggaattcgagcactttctgctggccttcccaagattgtggcagatgctcaggacgtagatggtcgcgatgaagcgctctacggtgcctacctggctgcggtgtcttttgcctctgctggctctggtctccaccacaagatctgccacgtgttgggtggaacttttaaccttccacacgcgcaaacccatgcaacagtactgccttatgttcttgccttcaacgcgccatatgcgccacaggcagaacaacgcgcagcggcagctttcggttctgcgacagcacttgaaggattgcaacagctgcgtgcccaagtgggagcaccacagcgactatccgattacggattcaccgcagcaggaatcccagaggcagtggaaatcatcttggagaaagtaccggcgaataatccacggacggtcacagaagaaaacctcactgcgctgcttaccacagcgctcaacggcgacgatccagcaactttgaattaaggagaccaacatgactattt

SEQ ID NO: 464 - protein, 356 aa, Corynebacterium glutamicum
MSLQFDHETLGQRVLFGSGEAAQNLAAEISRLDAKNVMVVAGDFELPMARQVAADIDVKVWHSNVVMHVPIETAEEARSVAKENDIDVVVCVGGGSTTGLAKAIAMTTALPIIAVPTTYAGSEATNVWGLTEAARKTTGVDNKVLPVTVIYDSALTMSLPVEMSVASGLNGLAHCIDSLWGPKADPINAAMAAEGIRALSAGLPKIVADAQDVDGRDEALYGAYLAAVSFASAGSGLHHKICHVLGGTFNLPHAQTHATVLPYVLAFNAPYAPQAEQRAAAAFGSATALEGLQQLRAQVGAPQRLSDYGFTAAGIPEAVEIILEKVPANNPRTVTEENLTALLTTALNGDDPATLN

SEQ ID NO: 465 - DNA, 311 bp, Corynebacterium glutamicum
  CDS (1)..(288): FRXA00177
ctgccttatgttcttgccttcaacgcgccatatgcgccacaggcagaacaacgcgcagcggcagctttcggttctgcgacagcacttgaaggattgcaacagctgcgtgcccaagtgggagcaccacagcgactatccgattacggattcaccgcagcaggaatcccagaggcagtggaaatcatcttggagaaagtaccggcgaataatccacggacggtcacagaagaaaacctcactgcgctgcttaccacagcgctcaacggcgacgatccagcaactttgaattaaggagaccaacatgactattt

SEQ ID NO: 466 - protein, 96 aa, Corynebacterium glutamicum
LPYVLAFNAPYAPQAEQRAAAAFGSATALEGLQQLRAQVGAPQRLSDYGFTAAGIPEAVEIILEKVPANNPRTVTEENLTALLTTALNGDDPATLN

SEQ ID NO: 467 - DNA, 1212 bp, Corynebacterium glutamicum
  CDS (101)..(1189): RXA02448
agcattcaccggccagatcttcaagaaggcttaaaccccctccgatctctttggctagcacctaacaaaccaccacaccttttagaaagtgattctcgctgtgaacaactcactcgcattcaaccacgacaccctcccacagaaagtcatgtttggatatggcaagtccagtgcattcttaaagcaggaagttgaacgccgcggctcagccaaggtcatggtcattgcgggtgaacgagaaatgtcgatcgcccataaggtggcctcagaaattgaggtggcgatctggcacgacgaagttgtcatgcacgtgcccatcgaagtagccgaacgtgcgcgtgcagtggcaaccgacaatgagattgatctgctggtgtgtgttggcggcggatccaccataggtttggccaaagcaattgccatgaccactgccctgcccatcgtcgcgatccccaccacctacgcaggatcggaagcaaccaacgtgtggggtctgacggaagcagcgcgcaaaacaaccggtgttgatctgaaggtgctccccgaaacagtcatttacgattccgaactcaccatgtcgcttccagtggagatgtccgtggcatccggactcaacggcctggcgcactgcattgattctttgtggggacccaacgccgatcccatcaacgcagtgcttgcagccgaaggaatccgcgcactcaaccagggactgccgaaaattgttgcgaacccgcacagcatcgaaggacgcgacgaagccctctacggcgcctacctcgcagcagtatccttcgcctccgcaggctccggactacaccacaaaatctgccacaccttgggaggcaccttcaacctcccccacgcccaaacccacgcaaccgtgctgccgtatgttttggcattcaacgcaggcgacgcaccagaagctgaacgccgcgcagccgcagcctttggaactgacaccgcactagaaggcctgcaacgcctccgcttgtcagtcaacgcaccgaaacgactttccgactacggcttcgaggcttcaggaattgctgaggcagtggacgtcacgttggagaaagttcccgccaacaatcctcgcccagtgacccgggaaaacctcagcagattgctcgaagcagcactcaacggtgaggatccggcagttcttagcgcagtactcagtaactaacccggcgatttttcaaggag

SEQ ID NO: 468 - protein, 363 aa, Corynebacterium glutamicum
VNNSLAFNHDTLPQKVMFGYGKSSAFLKQEVERRGSAKVMVIAGEREMSIAHKVASEIEVAIWHDEVVMHVPIEVAERARAVATDNEIDLLVCVGGGSTIGLAKAIAMTTALPIVAIPTTYAGSEATNVWGLTEAARKTTGVDLKVLPETVIYDSELTMSLPVEMSVASGLNGLAHCIDSLWGPNADPINAVLAAEGIRALNQGLPKIVANPHSIEGRDEALYGAYLAAVSFASAGSGLHHKICHTLGGTFNLPHAQTHATVLPYVLAFNAGDAPEAERRAAAAFGTDTALEGLQRLRLSVNAPKRLSDYGFEASGIAEAVDVTLEKVPANNPRPVTRENLSRLLEAALNGEDPAVLSAVLSN

SEQ ID NO: 469 - DNA, 1782 bp, Corynebacterium glutamicum
  CDS (101)..(1759): RXA00048
gcgaaggcgtgggcatagggaaaaccttagctgatctgcggtgacttaaatataagggggtggaatgggggtattgtaaaatctgaacccttgttcatttatgaatcatgattcagaatgtgatctagataatgttgttcagttcactattcaagaagggttagatcccatgtcacccaataacttcgataccgatgtctgcatcgtcggtggaggtcctaccggaacgctccttgcagtactgctcggccaaaaaggtcaccgcgtcaccatcctggaaaagtggccaacattctacgaacgacctcgtgcagtcacctttgaccacgaaatcgcacggatccttggatacattggcattgattctgaaaacgacgaagccatcgattaccactccgacagctacgactggaagaacgcagcgggggagacgcttttggaagtcgattggacctccatgacagattccggatggcgcacccgatactggttctaccagccagaacttgaaaagcgtctgcgcgatctggccctgaccatggattttgtagatattcgctgtggcttcaccgctgtcggattgtcccaagatgaaaactccgccatcattcacggcattgtcactgataccccagagaacattccagcagatgctcagcgcgaagatatccgagcgaagtatgtcatcggtgcagacggagctaacagtttcgtgcgtaactcccttggcttagagatgaatgatcttggatacttcttcgactggctgatcctggacctcaagccaactcaggacattgactacggaacagatcactggcaactgtgtgatcccaagcgcccaaccaccatcgttcctggaggccccggccgccgacgttgggaattcatggcgctgcctggtgaagatctcaaggaactcgcttctgaagaaagcgcgtggaatctacttgagccatgggatgtcacacctggcaaggccattctcgagcgctccgcagtgtatcgattccaagctcgctgggcccaggaatggcgctccggaagagctctcatcgcaggcgatgccgctcacctcatgccacctttcgcaggtgaaggcatgtgcgctggcctgagagactcactggcgttggcatggcgtcttgatttggtgctgagcggaaaatcagatgatgcattgctagacacctacggagaagaacgccgcgaacacgtccactactacattgatttctccatggacctgggcaatgtcatctgcattactgatgaagatgaagcacgtttgcgcgatgagcgcatgattaaagagcttgaagcacaagacggggtccctgttaataccgatgtcgcacacttgggaccgggaatttgggataaagattcttcccatggtggcgagctagcgaagcagggcatagtggaataccaaggtcgaaaggcgcgtttcgacgacgcagtcggccgtggctgggcagttttaggcctcaacactgatccacgagaagtgcttgatgaggattcgcttgtggcacttgacgccatcggtgcaatcgtcgaatcagtaggtgatgcaacttccgcagttttagatgttgaaggtctttacactcgctggctcaaggaagccggggcaacatttattattacccgccccgatttctacgtctattccacagcagtggacgctgaacaacttcaaacacagattaagcagctatcggatctacttcacctcaactcagttgtcggagcataggagctaaaaatgtctttaca

SEQ ID NO: 470 - protein, 553 aa, Corynebacterium glutamicum
MNHDSECDLDNVVQFTIQEGLDPMSPNNFDTDVCIVGGGPTGTLLAVLLGQKGHRVTILEKWPTFYERPRAVTFDHEIARILGYIGIDSENDEAIDYHSDSYDWKNAAGETLLEVDWTSMTDSGWRTRYWFYQPELEKRLRDLALTMDFVDIRCGFTAVGLSQDENSAIIHGIVTDTPENIPADAQREDIRAKYVIGADGANSFVRNSLGLEMNDLGYFFDWLILDLKPTQDIDYGTDHWQLCDPKRPTTIVPGGPGRRRWEFMALPGEDLKELASEESAWNLLEPWDVTPGKAILERSAVYRFQARWAQEWRSGRALIAGDAAHLMPPFAGEGMCAGLRDSLALAWRLDLVLSGKSDDALLDTYGEERREHVHYYIDFSMDLGNVICITDEDEARLRDERMIKELEAQDGVPVNTDVAHLGPGIWDKDSSHGGELAKQGIVEYQGRKARFDDAVGRGWAVLGLNTDPREVLDEDSLVALDAIGAIVESVGDATSAVLDVEGLYTRWLKEAGATFIITRPDFYVYSTAVDAEQLQTQIKQLSDLLHLNSVVGA

SEQ ID NO: 471 - DNA, 583 bp, Corynebacterium glutamicum
  CDS (1)..(564): RXA01126
tccgcagaatcactgccaccaaccctgttcctgaagccaccaacagctgtcaccggaccagagtccccaatccgaatcccttcctttgccaccaaggtggaattcgaaggtgagctcgcagtagttatcggcaagccctgcaagaacgtcaaggctgatgactggaagtctgtcgttttgggcttcaccatcatcaacgacgtctcctcccgtgacctccagttcgctgacggccagtgggcacgcgctaagggcattgacaccttcggccccatcggaccatggattgaaactgacatcaactccatcgacttggacaacctgcccatcaaggcacgcctcacccacgacggcgaaacccaattgaagcaggactccaactccaaccagatgatcatgaagatgggcgaaattatcgagttcatcaccgcctccatgaccctgctcccaggcgacgttattgcaaccggttctccagcaggcaccgaagcaatggttgacggcgactacatcgaaatcgaaattccaggcatcggcaagctgggcaacccagttgtggacgcctaaaatggatcaccaccat

SEQ ID NO: 472 - protein, 188 aa, Corynebacterium glutamicum
SAESLPPTLFLKPPTAVTGPESPIRIPSFATKVEFEGELAVVIGKPCKNVKADDWKSVVLGFTIINDVSSRDLQFADGQWARAKGIDTFGPIGPWIETDINSIDLDNLPIKARLTHDGETQLKQDSNSNQMIMKMGEIIEFITASMTLLPGDVIATGSPAGTEAMVDGDYIEIEIPGIGKLGNPVVDA

SEQ ID NO: 473 - DNA, 864 bp, Corynebacterium glutamicum
  CDS (101)..(841): RXA01117
tacgaaatctggcgattgttcgaccatcccatcaactcctctttttgttcgcattgcgaacccttgtgcatatgatgaacattacgttagcatgtctcacatgattaacaagagcatttcttccactgctgaagcggtggccgatatcccagacggtgcgtccatcgccgtcggtggtttcggcctcgtgggcatccccactgcattgatcctcgccctccgcgaacaaggcgcaggcgatctgaccatcatttccaacaacctaggcaccgacggtttcggcctcggactgttgcttttggataagaagatctccaagtccatcggctcctaccttggctccaacaaggaatatgcacgccagtacctggaaggagaactcaccgtcgagttcaccccgcagggcaccttggctgaacgcctccgcgcaggtggcgccggcatccctgcgttttacaccaccgcaggcgtgggcacccaggtcgcagaaggcggactcccacagcgctacaacaccgacggcaccgtcgccgtggtgtcccagccaaaggaaacccgcgaattcaacggccagctctacgtcatggaagagggcatccgcgccgattacgcactcgtgcacgcacacaaagcagatcgctttggcaacctggtgttccgcaagaccgcgcagaacttcaacccagatgcagcaatgagcggcaagatcaccattgctcaggtcgagcactttgtagacgaactccacccagatgagatcgatctgccaggaatttacgtcaaccgcgtcgtccacgttggaccgcaggaaaccggaatcgaaaacaggacggtgtctaactaatgacttgggatcataaccaa

SEQ ID NO: 474 - protein, 247 aa, Corynebacterium glutamicum
MINKSISSTAEAVADIPDGASIAVGGFGLVGIPTALILALREQGAGDLTIISNNLGTDGFGLGLLLLDKKISKSIGSYLGSNKEYARQYLEGELTVEFTPQGTLAERLRAGGAGIPAFYTTAGVGTQVAEGGLPQRYNTDGTVAVVSQPKETREFNGQLYVMEEGIRADYALVHAHKADRFGNLVFRKTAQNFNPDAAMSGKITIAQVEHFVDELHPDEIDLPGIYVNRVVHVGPQETGIENRTVSN

SEQ ID NO: 475 - DNA, 1629 bp, Corynebacterium glutamicum
  CDS (101)..(1606): RXA00772
gtcgcattctgcttgctgaagtggcacacctatgtgttctgcttgggtatagcagtgcgggaaaaatttgaaaaagtccgattacctgaggaggtattcaatgtctgatcgcattgcttcagaaaagctgcgctccaagctcatgtccgccgacgaggcggcacagtttgttaaccacggtgacaaggttggtttctccggcttcaccggcgctggctacccaaaggcactgcctacggcaatcgctaaccgggctaaagaagcacacggtgcaggcaacgactacgcaatcgacctgttcactggcgcatcgaccgcccctgactgcgatggcgtacttgcagaagctgacgctatccgctggcgcatgccatacgcatctgatccaatcatgcgtaacaagatcaactccggctccatgggatactccgatatccacctgtcccactccggccagcaggttgaagagggcttcttcggccagctcaacgtagctgtcattgaaatcacccgcatcactgaagagggctacatcatcccttcttcctccgtgggtaacaacgttgagtggctcaacgctgcagagaaggtcatcctcgaggttaactcttggcagtctgaagacctcgaaggtatgcacgacatctggtctgttcctgccctgccaaaccgcattgccgtgccaatcaacaagccaggcgaccgcatcggtaagacctacatcgagttcgacaccgacaaggttgttgctgttgttgagaccaacaccgcagaccgcaacgcaccattcaagcctgtcgacgacatctctaagaagatcgctggcaacttcctcgacttcctggaaagcgaagttgctgcaggtcgcctgtcctacgcgggctacatcatgcagtccggcgtgggcaacgtgcctaacgcggtgatggcaggcctgctggaatccaagtttgagaacatccaggcctacaccgaagttatccaggacggcatggtggacctcatcgacgccggcaagatgaccgttgcatccgcaacttccttctccctgtctcctgagtacgcagagaagatgaacaacgaggctaagcgttaccgcgagtccattatcctgcgcccacagcagatctctaaccacccagaggtcatccgccgcgttggcctgatcgccaccaacggtctcatcgaggctgacatttacggcaacgtcaactccaccaacgtttctggctcccgcgtcatgaacggcatcggcggctccggcgacttcacccgtaacggctacatctccagcttcatcaccccttcagaggcaaagggcggcgcaatctctgcgatcgttcctttcgcatcccacatcgaccacaccgagcacgatgtcatggttgttatctctgagtacggttacgcagaccttcgtggtctggctccacgtgagcgcgttgccaagatgatcggcctggctcaccctgattaccgcccactgctcgaggagtactacgctcgcgcaacctccggtgacaacaagtacatgcagacccctcatgatcttgcaaccgcgtttgatttccacatcaacctggctaagaacggctccatgaaggcataagttttttcttggtttagaaa

SEQ ID NO: 476 - protein, 502 aa, Corynebacterium glutamicum
MSDRIASEKLRSKLMSADEAAQFVNHGDKVGFSGFTGAGYPKALPTAIANRAKEAHGAGNDYAIDLFTGASTAPDCDGVLAEADAIRWRMPYASDPIMRNKINSGSMGYSDIHLSHSGQQVEEGFFGQLNVAVIEITRITEEGYIIPSSSVGNNVEWLNAAEKVILEVNSWQSEDLEGMHDIWSVPALPNRIAVPINKPGDRIGKTYIEFDTDKVVAVVETNTADRNAPFKPVDDISKKIAGNFLDFLESEVAAGRLSYAGYIMQSGVGNVPNAVMAGLLESKFENIQAYTEVIQDGMVDLIDAGKMTVASATSFSLSPEYAEKMNNEAKRYRESIILRPQQISNHPEVIRRVGLIATNGLIEADIYGNVNSTNVSGSRVMNGIGGSGDFTRNGYISSFITPSEAKGGAISAIVPFASHIDHTEHDVMVVISEYGYADLRGLAPRERVAKMIGLAHPDYRPLLEEYYARATSGDNKYMQTPHDLATAFDFHINLAKNGSMKA

SEQ ID NO: 477 - DNA, 498 bp, Corynebacterium glutamicum
  CDS (101)..(475): RXA01288
tgctcaatttcacaccacacgacatcactggaaaaacctgacatcgccggctgatatatatggaaatatcaactccacccacgttgcgggtacgcgcgtgatgaatggtatcggcggctcgggcgatttcacgcgtaacgcctttgcttccacatttatctctccctcggcagccaaagttgatgcgatttccgcgattgtgcctttcgcgtcccatatcgatcacacggaacatgatgcgatggttgtcattactgaatatggctacgcagacctgcgcgggctatcgccaaaacaacgagtccccaaaatgattgccatcgcccacccggactatcgaccactgctggaagcatactttgaccgggcgctgaacagtgctgattcctatcagcacaccctgcatgatctgcgcaccgccttcgatttccataatcgcttgaactcacaaggaaccatgaaaatcgaaaaagcatagtgcttttcgacgagccctcc

SEQ ID NO: 478 - protein, 125 aa, Corynebacterium glutamicum
MNGIGGSGDFTRNAFASTFISPSAAKVDAISAIVPFASHIDHTEHDAMVVITEYGYADLRGLSPKQRVPKMIAIAHPDYRPLLEAYFDRALNSADSYQHTLHDLRTAFDFHNRLNSQGTMKIEKA

SEQ ID NO: 479 - DNA, 18 bp, Artificial Sequence
  Description of Artificial Sequence: primer
ggaaacagtatgaccatg

SEQ ID NO: 480 - DNA, 17 bp, Artificial Sequence
  Description of Artificial Sequence: primer
gtaaaacgacggccagt
